(19) United States
(12) Patent Application Publication
(10) Pub. No.: US 2025/0345407 A1
(43) Pub. Date: Nov. 13, 2025

(54) NUCLEIC ACID BASED VACCINE ENCODING AN ESCHERICHIA COLI FIMH ANTIGENIC POLYPEPTIDE

(71) Applicant: CureVac SE, Tübingen (DE)

(72) Inventors: Roberto ADAMO, Siena (IT); Hans Wolfgang GROSSE, Tübingen (DE); Benjamin PETSCH, Tübingen (DE); Sanjay PHOGAT, Siena (IT); Susanne RAUCH, Tübingen (DE); Sandro ROIER, Tübingen (DE); Roberto ROSINI, Siena (IT)

(73) Assignee: CureVac SE, Tübingen (DE)

(21) Appl. No.: 18/868,888

(22) PCT Filed: May 23, 2023
(86) PCT No.: PCT/EP2023/063799

§ 371 Date: Nov. 25, 2024

Related U.S. Application Data
(60) Provisional application No. 63/345,610, filed on May 25, 2022.

(51) Int. Cl. A61K 39/108; A61K 39/00; A61P 37/04; C07K 14/245

(52) U.S. Cl. CPC A61K 39/0258; A61P 37/04; C07K 14/245; A61K 2039/53; A61K 2039/6018

(57) ABSTRACT

The disclosure is directed to a coding RNA encoding an antigenic polypeptide which is selected or derived from Escherichia coli FimH. The present disclosure is also directed to compositions and vaccines comprising said coding RNA. Further, the disclosure concerns a kit, particularly a kit of parts comprising the coding RNA, or the composition, or the vaccine. The disclosure is also directed to methods of treating or preventing a disorder caused by E. coli.

### SEQUENCE LISTING

[0001] The instant application contains an electronically submitted ST.26 Sequence Listing in XML file format (production date 2023-05-19) which is hereby incorporated by reference in its entirety. Additional sequences shorter than 10 specifically defined nucleotides or 4 specifically defined amino acid are disclosed in Table 13.

### FIELD OF THE INVENTION

[0002] The present disclosure is directed to a coding RNA encoding an antigenic polypeptide which is selected or derived from Escherichia coli FimH. The disclosure is also directed to pharmaceutical compositions, vaccines, kits or kits of parts suitable for use in the treatment and/or prevention of disease, in particular, urinary tract infection (UTI).

### BACKGROUND TO THE INVENTION

[0003] Uropathogenic Escherichia coli (UPEC), a subgroup of Extraintestinal Pathogenic Escherichia coli (ExPEC), causes the vast majority of urinary tract infections (UTIs) and is a leading cause of adult bacteraemia as well as the second most common cause of neonatal meningitis. UTIs are commonly treated with antibiotics but the emergence of multi-drug resistant pathogens has highlighted the need for an effective vaccine to prevent both uncomplicated and complicated urinary tract infections (Flores-Mireles A L, et als. Nat Rev Microbiol. 2015 May; 13(5):269-84). The tip-localized adhesin FimH of the type 1 pili (type 1 fimbriae D-mannose specific adhesin) allows ExPEC to colonize the bladder epithelium during UTIs by binding to mannosylated receptors on the urothelial surface (Mulvey M A, et al. Science. 1998 Nov. 20; 282(5393):1494-7). Full-length FimH is composed of two domains connected by a 5-amino acid linker: an N-terminal lectin domain (FimHL), which binds mannose on urothelial cells receptors, and a C-terminal pilin domain (FimHP). The pilin domain (FimHP) has an (Ig)-like fold but lacks the seventh C-terminal beta strand. The absence of a strand produces a deep groove along the surface of FimHP and exposes its hydrophobic core, thereby accounting for the instability of FimH when expressed without a chaperone. In the chaperone:subunit complex FimHP interacts non-covalently with a donor strand either of the chaperone FimC in the periplasm, or of the subsequent subunit of the assembled pilus (FimG) in a process known as donor strand complementation or donor strand exchange, respectively, which simultaneously stabilizes the pilus subunits and caps their interactive surfaces.

[0004] The lectin domain (FimHL) is known to adopt two conformations with different mannose-binding affinity—a high-affinity conformation, also known as relaxed (R) state, and a low-affinity conformation, also known as tense (T) state. The in vivo conformation of FimH is influenced by flow conditions, shear stress conditions being known to induce a high-mannose binding conformation, and is also at least partly determined by the in vivo interaction with the FimH binding proteins FimG or FimC.

[0005] Antibodies binding to FimH prevent colonization and facilitate the clearance of the bacteria by inhibiting bacterial adhesion to the urinary tract (Langermann S, et al. Science. 1997 Apr. 25; 276(5312):607-11). Particularly, monoclonal antibodies against FimHL in the low affinity conformation have been shown to provide an improved inhibition of adhesion to the bladder (Tchesnokova et al. Infect Immun. 2011 October; 79(10):3895-904). Transudation of serum IgGs in the urogenital tract seems responsible for inhibiting bacterial adhesion.

[0006] Therefore, FimH is considered as a promising vaccine antigen. However, manufacturing FimH at commercial scale is challenging, as FimH needs to be produced in sufficient amounts and in the conformation capable of eliciting functional antibodies.

[0007] Clinical trials testing a four-dose regimen of FimH complexed with its chaperon FimC (FimHC) and formulated with the adjuvant PHAD have been reported (Eldridge G R, et al. Hum Vaccin Immunother. 2021 May 4; 17(5):1262-1270). While FimC seems to prevent FimH degradation, providing FimHC complexes involves significant production burdens.

[0008] Alternative strategies for recombinant production of FimH in a functional conformation have also been reported, such as engineering of the mannose pocket (Kisiela D I, et al. Proc Natl Acad Sci USA. 2013 Nov. 19; 110(47):19089-94), complexing FimH with a recombinant donor strand peptide of FimG (Sauer M M, et al. Nat Commun. 2016 Mar. 7; 7:10738), or mammalian cell expression of a FimH stabilized by a donor strand peptide of FimG.

[0009] Therefore, there remains a need to overcome the challenges due to recombinant production of FimH-based vaccines and to provide immunogenic compositions capable of eliciting a rapid and robust immune response against ExPEC.

### SUMMARY OF THE INVENTION

[0010] In a first aspect of the invention it is provided a coding RNA comprising at least one untranslated region (UTR); and at least one coding sequence encoding an antigenic polypeptide which is selected or derived from Escherichia coli (“E. coli”, “Ec”) type 1 fimbriae D-mannose specific adhesin (FimH). In one embodiment the E. coli FimH comprises an amino acid sequence which is identical or at least 70%, 80%, 85%, 86%, 87%, 88%, 89%, 90%, 91%, 92%, 93%, 94%, 95%, 96%, 97%, 98%, or 99% identical to any one of SEQ ID NOs: 177-186, 247-256 or is an immunogenic fragment or immunogenic variant thereof.

[0011] In some embodiments, the coding sequence additionally encodes one or more further peptide or protein elements selected from: a donor strand peptide, a signal peptide, an antigen clustering domain, or a transmembrane domain. In one embodiment, the further peptide or protein element is a donor strand peptide, and optionally the coding sequence encodes the following elements in N-terminal to C-terminal direction: the antigenic polypeptide which is selected or derived from Escherichia coli FimH; and the donor strand peptide.

[0012] In one embodiment, the donor strand peptide comprises or consists of the amino acid sequence of SEQ ID NO: 338 or a variant thereof, optionally wherein the variant of SEQ ID NO: 338 has from 1 to 5, such as 1, 2, 3 or 4 single amino acid mutations compared to SEQ ID NO: 338. In one embodiment, the coding sequence additionally encodes a peptide linker element, and optionally the coding sequence encodes the following elements in N-terminal to C-terminal direction: the antigenic polypeptide which is selected or derived from Escherichia coli FimH; the peptide linker element; and the donor strand peptide. In one embodiment, the peptide linker element comprises or consists of SEQ ID NO: 352.

[0013] In one embodiment, the antigenic peptide is in a low mannose binding affinity conformation. In certain embodiments, the coding sequence additionally encodes an antigen clustering domain, and optionally the antigen clustering domain is selected or derived from ferritin or lumazine synthase. In some additional embodiments, the amino acid sequence of the antigen clustering domain is identical or at least 70%, 80%, 85%, 86%, 87%, 88%, 89%, 90%, 91%, 92%, 93%, 94%, 95%, 96%, 97%, 98%, or 99% identical to any one of amino acid sequences SEQ ID NOs: 457-459, 443, 444, or fragment or variant thereof.

[0014] In certain embodiments, the coding sequence additionally encodes a signal peptide, and optionally the signal peptide is or is derived from immunoglobulin E (IgE) or immunoglobulin Kappa (IgK). In some additional embodiments, the amino acid sequences of said signal peptides is identical or at least 70%, 80%, 85%, 86%, 87%, 88%, 89%, 90%, 91%, 92%, 93%, 94%, 95%, 96%, 97%, 98%, or 99% identical to any one of amino acid sequences SEQ ID NOs: 394, 395, or fragment or variant thereof.

[0015] In some embodiments, the coding sequence encodes the following elements optionally in N-terminal to C-terminal direction: (a) signal peptide, antigenic polypeptide; (b) signal peptide, antigenic polypeptide, peptide linker, donor strand peptide; (c) antigen clustering domain, peptide linker, antigenic polypeptide, peptide linker, donor strand peptide; (d) signal peptide, antigen clustering domain, peptide linker, antigenic polypeptide, peptide linker, donor strand peptide; (e) signal peptide, antigenic polypeptide, peptide linker, donor strand peptide, peptide linker, antigen clustering domain; or (f) signal peptide, antigenic polypeptide, peptide linker, donor strand peptide, peptide linker, transmembrane domain.

[0016] In some embodiments, the coding sequence encodes an amino acid sequence which is identical or at least 70%, 80%, 85%, 86%, 87%, 88%, 89%, 90%, 91%, 92%, 93%, 94%, 95%, 96%, 97%, 98%, or 99% identical to any one of SEQ ID NOs: 177-186, 247-256, 498-520, 1277, or an immunogenic fragment or immunogenic variant thereof. In some embodiments, the coding sequence comprises a nucleic acid sequences which is identical or at least 70%, 80%, 85%, 86%, 87%, 88%, 89%, 90%, 91%, 92%, 93%, 94%, 95%, 96%, 97%, 98%, or 99% identical to the sequences according to any one of SEQ ID NOs: 187-246, 257-316, 523-545, 548-570, 573-595, 598-620, 623-645, 648-670, or a fragment or a variant thereof.

[0017] In some embodiments, the coding sequence comprises at least one modified nucleotide selected from pseudouridine (ψ) and N1-methylpseudouridine (m1ψ), optionally wherein essentially all uracil nucleotides are replaced by pseudouridine (ψ) nucleotides and/or N1-methylpseudouridine (m1ψ) nucleotides. In some embodiments, the coding sequence is a codon modified coding sequence, wherein the amino acid sequence encoded by the at least one codon modified coding sequence is optionally not being modified compared to the amino acid sequence encoded by the corresponding wild type coding sequence, optionally wherein the at least one codon modified coding sequence is selected from C maximized coding sequence, CAI maximized coding sequence, human codon usage adapted coding sequence, G/C content modified coding sequence, and G/C optimized coding sequence, or any combination thereof.

[0018] In one embodiment, the coding RNA is an mRNA, optionally comprising or consisting of a nucleic acid sequence which is identical or at least 70%, 80%, 85%, 86%, 87%, 88%, 89%, 90%, 91%, 92%, 93%, 94%, 95%, 96%, 97%, 98%, or 99% identical to a nucleic acid sequence according to any one of SEQ ID NOs: 673-695, 698-720, 723-745, 748-770, 773-795, 798-820, 823-845, 848-870, 873-895, 898-920, 923-945, 948-970, 973-995, 998-1020, 1023-1045, 1048-1070, 1073-1095, 1098-1120, 1123-1145, 1148-1170, 1173-1195, 1198-1220, 1223-1245, 1248-1276 or a fragment or variant thereof.

[0019] In a second aspect, it is provided a pharmaceutical composition comprising the coding RNA of the disclosure. In some embodiments, the pharmaceutical composition further comprises lipid-base carriers, wherein the lipid-base carriers are lipid nanoparticles (LNP).

[0020] In a third aspect, it is provided a vaccine comprising the coding RNA or the pharmaceutical composition of the disclosure.

[0021] In a fourth aspect, it is provided a Kit or kit of parts, comprising the coding RNA, the pharmaceutical composition, and/or the vaccine of the disclosure, optionally comprising a liquid vehicle for solubilising, and, optionally, technical instructions providing information on administration and dosage of the components.

[0022] In a further aspect, it is provided a coding RNA, a pharmaceutical composition, the vaccine, or the kit or kit of parts of the disclosure, for use as a medicament. In one embodiment, the coding RNA, pharmaceutical composition, vaccine, or kit or kit of parts of the disclosure are for use in treating or preventing one or more symptoms associated with urinary tract infections (UTI) in a subject in need thereof.

[0023] In a further aspect, it is provided a coding RNA, a pharmaceutical composition, the vaccine, or the kit or kit of parts of the disclosure, for use as a medicament. In one embodiment, the coding RNA, pharmaceutical composition, vaccine, or kit or kit of parts of the disclosure are for use in treating or preventing a disease caused by E. coli.

[0024] In a further aspect, it is provided a method of treating or preventing a disorder, wherein the method comprises administering to a subject in need thereof an effective amount of the coding RNA, the pharmaceutical composition, the vaccine, or the kit or kit of parts of the disclosure. In one embodiment the method elicits antibodies which are capable of inhibiting bacterial adhesion.

### BRIEF DESCRIPTION OF THE DRAWINGS

[0025] FIG. 1: (A) (B): shows that mRNA constructs encoding different E. coli FimH antigen designs were expressed and partially secreted by mammalian cells using Western blot analysis. The experiment was performed as described in Example 2.1.

[0026] FIG. 2: (A)-(F) shows that formulated mRNA constructs encoding different E. coli FimH antigen designs elicited humoral immune response in mice. Serum and urine IgG titers were assessed by ELISA as described in Example 2.2.

[0027] FIG. 3: shows CD4+ and CD8+ T cell responses elicited by vaccination of mice with mRNA constructs encoding different E. coli FimH antigen designs as described in Example 2.4.

[0028] FIG. 4: (A)-(C): shows a dose response of formulated mRNA constructs encoding different E. coli FimH antigen designs upon vaccination of rats. Serum and urine IgG titers were assessed by ELISA as described in Example 3.1.

[0029] FIG. 5: (A) (B): shows that mRNA constructs encoding E. coli FimH antigen designs comprising uridine, ψ, or m1ψ were expressed and partially secreted by mammalian cells using Western blot analysis. The experiment was performed as described in Example 4.1.

[0030] FIG. 6: (A)-(C): shows that formulated mRNA constructs encoding E. coli FimH antigen designs comprising uridine, ψ, or m1ψ elicited humoral immune response in rats. Serum and urine IgG titers were assessed by ELISA as described in Example 2.2.

### DEFINITIONS

[0031] For the sake of clarity and readability the following definitions are provided. Any technical feature mentioned for these definitions may be read on each and every embodiment of the invention. Additional definitions and explanations may be specifically provided in the context of these embodiments.

[0032] Percentages in the context of numbers should be understood as relative to the total number of the respective items. In other cases, and unless the context dictates otherwise, percentages should be understood as percentages by weight (wt.-%).

[0033] About: The term “about” is used when determinants or values do not need to be identical, i.e. 100% the same. Accordingly, “about” means, that a determinant or values may diverge by 1% to 20%, for example by 1% to 10%; in particular, by 1%, 2%, 3%, 4%, 5%, 6%, 7%, 8%, 9%, 10%, 11%, 12%, 13%, 14%, 15%, 16%, 17%, 18%, 19%, 20%. The skilled person knows that e.g. certain parameters or determinants can slightly vary based on the method how the parameter has been determined. For example, if a certain determinants or value is defined herein to have e.g. a length of “about 100 nucleotides”, the length may diverge by 1% to 20%. Accordingly, the skilled person knows that in that specific example, the length may diverge by 1 to 20 nucleotides. Accordingly, a length of “about 100 nucleotides” may encompass sequences ranging from 80 to 120 nucleotides.

[0034] Adaptive immune response: The term “adaptive immune response” as used herein will be recognized and understood by the person of ordinary skill in the art, and is e.g. intended to refer to an antigen-specific response of the immune system (the adaptive immune system). Antigen specificity allows for the generation of responses that are tailored to specific pathogens or pathogen-infected cells. The ability to mount these tailored responses is usually maintained in the body by “memory cells” (B-cells).

[0035] Antigen: The term “antigen” as used herein will be recognized and understood by the person of ordinary skill in the art, and is e.g. intended to refer to a substance which may be recognized by the immune system, for example by the adaptive immune system, and is capable of triggering an antigen-specific immune response, e.g. by formation of antibodies and/or antigen-specific T cells as part of an adaptive immune response. Typically, an antigen may be or may comprise a peptide or protein which may be presented by the MHC to T-cells. Also fragments, variants and derivatives of peptides or proteins comprising at least one epitope are understood as antigens.

[0036] Antigenic peptide, polypeptide or protein: The term “antigenic peptide or protein” or “immunogenic peptide or protein” will be recognized and understood by the person of ordinary skill in the art, and is e.g. intended to refer to a peptide, protein derived from a (antigenic or immunogenic) protein which stimulates the body's adaptive immune system to provide an adaptive immune response. Therefore an antigenic/immunogenic peptide or protein comprises at least one epitope (as defined herein) or antigen (as defined herein) of the protein it is derived from.

[0037] Cationic: Unless a different meaning is clear from the specific context, the term “cationic” means that the respective structure bears a positive charge, either permanently or not permanently, but in response to certain conditions such as pH. Thus, the term “cationic” covers both “permanently cationic” and “cationisable”. The term “permanently cationic” means, e.g., that the respective compound, or group, or atom, is positively charged at any pH value or hydrogen ion activity of its environment. Typically, the positive charge results from the presence of a quaternary nitrogen atom. Where a compound carries a plurality of such positive charges, it may be referred to as permanently polycationic.

[0038] Cationisable: The term “cationisable” as used herein means that a compound, or group or atom, is positively charged at a lower pH and uncharged at a higher pH of its environment. Also in non-aqueous environments where no pH value can be determined, a cationisable compound, group or atom is positively charged at a high hydrogen ion concentration and uncharged at a low concentration or activity of hydrogen ions. It depends on the individual properties of the cationisable or polycationisable compound, in particular the pKa of the respective cationisable group or atom, at which pH or hydrogen ion concentration it is charged or uncharged. In diluted aqueous environments, the fraction of cationisable compounds, groups or atoms bearing a positive charge may be estimated using the so-called Henderson-Hasselbalch equation which is well-known to a person skilled in the art. E.g., in some embodiments, if a compound or moiety is cationisable, it is suitable that it is positively charged at a pH value of about 1 to 9, preferably 4 to 9, 5 to 8 or even 6 to 8, for example of a pH value of or below 9, of or below 8, of or below 7, for example at physiological pH values, e.g. about 7.3 to 7.4, i.e. under physiological conditions, particularly under physiological salt conditions of the cell in vivo. In other embodiments, it is suitable that the cationisable compound or moiety is predominantly neutral at physiological pH values, e.g. about 7.0-7.4, but becomes positively charged at lower pH values. In some embodiments, the range of pKa for the cationisable compound or moiety is about 5 to about 7.

[0039] Coding sequence/coding region: The terms “coding sequence” or “coding region” and the corresponding abbreviation “cds” as used herein will be recognized and understood by the person of ordinary skill in the art, and are e.g. intended to refer to a sequence of several nucleotide triplets, which may be translated into a peptide or protein. A coding sequence in the context of the present disclosure may be an RNA sequence consisting of a number of nucleotides that may be divided by three, which starts with a start codon and which for example terminates with a stop codon.

[0040] Derived from: The term “derived from” as used throughout the present specification in the context of a nucleic acid, i.e. for a nucleic acid “derived from” (another) nucleic acid, means that the nucleic acid, which is derived from (another) nucleic acid, shares e.g. at least 60%, 70%, 80%, 81%, 82%, 83%, 84%, 85%, 86%, 87%, 88%, 89%, 90%, 91%, 92%, 93%, 94%, 95%, 96%, 97%, 98%, or 99% sequence identity with the nucleic acid from which it is derived. The skilled person is aware that sequence identity is typically calculated for the same types of nucleic acids, i.e. for DNA sequences or for RNA sequences. Thus, it is understood, if a DNA is “derived from” an RNA or if an RNA is “derived from” a DNA, in a first step the RNA sequence is converted into the corresponding DNA sequence (in particular by replacing the uracils (U) by thymines (T) throughout the sequence) or, vice versa, the DNA sequence is converted into the corresponding RNA sequence (in particular by replacing the T by U throughout the sequence). Thereafter, the sequence identity of the DNA sequences or the sequence identity of the RNA sequences is determined. For example, a nucleic acid “derived from” a nucleic acid also refers to nucleic acid, which is modified in comparison to the nucleic acid from which it is derived, e.g. in order to increase RNA stability even further and/or to prolong and/or increase protein production. In the context of amino acid sequences (e.g. antigenic peptides or proteins) the term “derived from” means that the amino acid sequence, which is derived from (another) amino acid sequence, shares e.g. at least 60%, 70%, 75%, 80%, 81%, 82%, 83%, 84%, 85%, 86%, 87%, 88%, 89%, 90%, 91%, 92%, 93%, 94%, 95%, 96%, 97%, 98%, or 99% sequence identity with the amino acid sequence from which it is derived.

[0041] Donor strand peptide: The term “donor strand peptide” as used throughout the present specification means the portion of the FimC or FimG polypeptides that interacts in vivo or in vitro with FimHP and completes the atypical Ig-fold of FimHP by occupying the groove and running parallel to the subunit C-terminal F strand.

[0042] Fragment: The term “fragment” as used throughout the present specification in the context of a nucleic acid sequence (e.g. RNA or a DNA) or an amino acid sequence may typically be a shorter portion of a full-length sequence of e.g. a nucleic acid sequence or an amino acid sequence. Accordingly, a fragment typically consists of a sequence that is identical to the corresponding stretch within the full-length sequence. A particular fragment of a sequence in the context of the present disclosure, consists of a continuous stretch of entities, such as nucleotides or amino acids corresponding to a continuous stretch of entities in the molecule the fragment is derived from, which represents at least 40%, 50%, 60%, 70%, 80%, 90%, 95% of the total (i.e. full-length) molecule from which the fragment is derived (e.g. a virus protein). The term “fragment” as used throughout the present specification in the context of proteins or peptides may, typically, comprise a sequence of a protein or peptide as defined herein, which is, with regard to its amino acid sequence, N-terminally and/or C-terminally truncated compared to the amino acid sequence of the original protein. The term “fragment” as used throughout the present specification in the context of RNA sequences may, typically, comprise an RNA sequence that is 5′-terminally and/or 3′-terminally truncated compared to the reference RNA sequence. Such truncation may thus occur either on the amino acid level or correspondingly on the nucleic acid level. A sequence identity with respect to such a fragment as defined herein may therefore for example refer to the entire protein or peptide as defined herein or to the entire (coding) nucleic acid molecule of such a protein or peptide. Fragments of proteins or peptides may comprise at least one epitope of those proteins or peptides.

[0043] Identity (of a sequence): The term “identity” as used throughout the present specification in the context of a nucleic acid sequence or an amino acid sequence will be recognized and understood by the person of ordinary skill in the art, and is e.g. intended to refer to the percentage to which two sequences are identical. To determine the percentage to which two sequences are identical, e.g. nucleic acid sequences or amino acid (aa) sequences as defined herein, for example the aa sequences encoded by the nucleic acid sequence as defined herein or the aa sequences themselves, the sequences can be aligned in order to be subsequently compared to one another. Therefore, e.g. a position of a first sequence may be compared with the corresponding position of the second sequence. If a position in the first sequence is occupied by the same residue as is the case at a position in the second sequence, the two sequences are identical at this position. If this is not the case, the sequences differ at this position. If insertions occur in the second sequence in comparison to the first sequence, gaps can be inserted into the first sequence to allow a further alignment. If deletions occur in the second sequence in comparison to the first sequence, gaps can be inserted into the second sequence to allow a further alignment. The percentage to which two sequences are identical is then a function of the number of identical positions divided by the total number of positions including those positions which are only occupied in one sequence. The percentage to which two sequences are identical can be determined using an algorithm, e.g. an algorithm integrated in the BLAST program. Sequence identity can be determined by using the EMBOSS Water sequence alignment tool at the EMBL-EBI website https://www.ebi.ac.uk/Tools/psa/emboss_water/with the parameters gap open=12, gap extend=1 and matrix=BLOSUM62 for protein sequences or matrix=fullDNA for DNA/RNA sequences, or by using the EMBOSS Needle sequence alignment tool at the EMBL-EBI website https://www.ebi.ac.uk/Tools/psa/emboss_needle/with default parameters (e.g. gap open=10, gap extend=0.5, end gap penalty=false, end gap open=10 and end gap extend=0.5 and matrix=BLOSUM62 for protein sequences or matrix=fullDNA for DNA/RNA sequences). Unless specified otherwise, where the application refers to sequence identity to a particular reference sequence, the identity is intended to be calculated over the entire length of that reference sequence.

[0044] Immunogen, Immunogen: The terms “immunogen” or “immunogenic” will be recognized and understood by the person of ordinary skill in the art, and are e.g. intended to refer to a compound that is able to stimulate/induce an (adaptive) immune response. An immunogen may be a peptide, polypeptide, or protein.

[0045] Immune response: The term “immune response” will be recognized and understood by the person of ordinary skill in the art, and is e.g. intended to refer to a specific reaction of the adaptive immune system to a particular antigen (so called specific or adaptive immune response) or an unspecific reaction of the innate immune system (so called unspecific or innate immune response), or a combination thereof.

[0046] Lipidoid: A lipidoid, also referred to as lipidoid compound, is a lipid-like compound, i.e. an amphiphilic compound with lipid-like physical properties. In the context of the present disclosure, the term lipid is considered to encompass lipidoid compounds.

[0047] Nucleic acid, nucleic acid molecule: The terms “nucleic acid” or “nucleic acid molecule” as used herein, will be recognized and understood by the person of ordinary skill in the art. The terms “nucleic acid” or “nucleic acid molecule” particularly refers to DNA (molecules) or RNA molecules). The term is used synonymously with the term polynucleotide. For example, a nucleic acid or a nucleic acid molecule is a polymer comprising or consisting of nucleotide monomers that are covalently linked to each other by phosphodiester-bonds of a sugar/phosphate-backbone. The terms “nucleic acid” or “nucleic acid molecule” also encompasses modified nucleic acid (molecules), such as base-modified, sugar-modified or backbone-modified DNA or RNA (molecules) as defined herein.

[0048] Nucleic acid sequence, DNA sequence, RNA sequence: The terms “nucleic acid sequence”, “DNA sequence”, “RNA sequence” will be recognized and understood by the person of ordinary skill in the art, and e.g. refer to a particular and individual order of the succession of its nucleotides.

[0049] RNA species: In the context of the disclosure, the term “RNA species” is not restricted to mean one single molecule but is understood to comprise an ensemble of essentially identical RNA molecules. Accordingly, it may relate to a plurality of essentially identical RNA molecules.

[0050] RNA: The term “RNA” is the usual abbreviation for ribonucleic acid. It is a nucleic acid molecule, i.e. a polymer consisting of nucleotide monomers. These nucleotides are usually adenosine-monophosphate (AMP), uridine-monophosphate (UMP), guanosine-monophosphate (GMP) and cytidine-monophosphate (CMP) monomers or analogs thereof, which are connected to each other along a so-called backbone. The backbone is typically formed by phosphodiester bonds between the sugar, i.e. ribose, of a first and a phosphate moiety of a second, adjacent monomer. The specific order of the monomers, i.e. the order of the bases linked to the sugar/phosphate-backbone, is called the RNA sequence. In general, RNA can be obtained by transcription of a DNA sequence, e.g. inside a cell or in vitro. In the context of the disclosure, the RNA may be obtained by RNA in vitro transcription. Alternatively, RNA may be obtained by chemical synthesis.

[0051] RNA in vitro transcription: The terms “RNA in vitro transcription” or “in vitro transcription” relate to a process wherein RNA is synthesized in a cell-free system in vitro. RNA may be obtained by DNA-dependent in vitro transcription of an appropriate DNA template, which is typically a linear DNA template (e.g. linearized plasmid DNA or PCR product). The promoter for controlling RNA in vitro transcription can be any promoter for any DNA-dependent RNA polymerase. Particular examples of DNA-dependent RNA polymerases are the T7, T3, SP6, or Syn5 RNA polymerases. In one embodiment of the present invention the DNA template is linearized with a suitable restriction enzyme before it is subjected to RNA in vitro transcription. Reagents typically used in RNA in vitro transcription include: a DNA template (linearized plasmid DNA or PCR product) with a promoter sequence that has a high binding affinity for its respective RNA polymerase such as bacteriophage-encoded RNA polymerases (T7, T3, SP6, or Syn5); ribonucleotide triphosphates (NTPs) for the four bases (adenine, cytosine, guanine and uracil); optionally, a cap analogue as defined herein; optionally, modified nucleotides as defined herein; a DNA-dependent RNA polymerase capable of binding to the promoter sequence within the DNA template (e.g. T7, T3, SP6, or Syn5 RNA polymerase); optionally, a ribonuclease (RNase) inhibitor to inactivate any potentially contaminating RNase; optionally, pyrophosphatase; MgCl₂; a buffer (TRIS or HEPES) to maintain a suitable pH value, which can also contain antioxidants (e.g. DTT), and/or polyamines such as spermidine.

[0052] Variant (of a sequence): The term “variant” as used throughout the present specification in the context of a nucleic acid sequence will be recognized and understood by the person of ordinary skill in the art, and is e.g. intended to refer to a variant of a nucleic acid sequence derived from another nucleic acid sequence. E.g., a variant of a nucleic acid sequence may exhibit one or more nucleotide deletions, insertions, additions and/or substitutions compared to the nucleic acid sequence from which the variant is derived. A variant of a nucleic acid sequence may at least 50%, 60%, 70%, 80%, 90%, or 95% identical to the nucleic acid sequence the variant is derived from. The variant is a functional variant in the sense that the variant has retained at least 50%, 60%, 70%, 80%, 90%, or 95% or more of the function of the sequence where it is derived from. A “variant” of a nucleic acid sequence may have at least 70%, 75%, 80%, 85%, 90%, 95%, 98% or 99% nucleotide identity over a stretch of at least 10, 20, 30, 50, 75 or 100 nucleotide of such nucleic acid sequence.

[0053] The term “variant” as used throughout the present specification in the context of proteins or peptides is e.g. intended to refer to a proteins or peptide variant having an amino acid sequence which differs from the original sequence in one or more mutation(s)/substitution(s), such as one or more substituted, inserted and/or deleted amino acid(s). Suitably, these fragments and/or variants have the same, or a comparable specific antigenic property (immunogenic variants, antigenic variants). Insertions and substitutions are possible, in particular, at those sequence positions which cause no modification to the three-dimensional structure or do not affect the binding region. Modifications to a three-dimensional structure by insertion(s) or deletion(s) can easily be determined e.g. using CD spectra (circular dichroism spectra). A “variant” of a protein or peptide may have at least 70%, 75%, 80%, 85%, 90%, 95%, 98% or 99% amino acid identity over a stretch of at least 10, 20, 30, 50, 75 or 100 amino acids of such protein or peptide. Alternatively, a “variant” of a protein or polypeptide may have from 1 to 20, for example from 1 to 10 single amino acid mutations compared to such protein or peptide, for example, 1, 2, 3, 4, 5, 6, 7, 8, 9, 10, 11, 12, 13, 15, 16, 17, 18, 19 or 20 single amino acid mutations. For mutations we mean or include substitution, insertion or deletion. In one embodiment, a variant of a protein comprises a functional variant of the protein, which means, in the context of the disclosure, that the variant exerts essentially the same, or at least 40%, 50%, 60%, 70%, 80%, 90% of the immunogenicity as the protein it is derived from.

### DETAILED DESCRIPTION OF THE INVENTION

[0054] Where reference is made to “SEQ ID NOs” of other patent applications or patents, said sequences, e.g. amino acid sequences or nucleic acid sequences, are explicitly incorporated herein by reference. For “SEQ ID NOs” provided herein, information provided under “feature key”, i.e. “source” (for nucleic acids or proteins) or “misc_feature” (for nucleic acids) or “REGION” (for proteins) (in the sequence listing according to WIPO ST.26 Standard) is also explicitly included herein in its entirety. Where reference is made to “SEQ ID NOs” in the context of RNA sequences, the skilled person will understand and be able to derive RNA sequences from the referenced SEQ ID NOs also in cases where DNA sequences are provided. Where reference is made to “SEQ ID NOs” in the context of DNA sequences, the skilled person will understand and will be able to derive respective DNA sequences from the referenced SEQ ID NOs also in cases where RNA sequences are provided.

[0055] The inventors overcame the challenges of production of recombinant polypeptides of E. coli by administering an RNA vaccine encoding an antigenic polypeptide which is or is derived from E. coli FimH. The inventors further overcame the challenges of raising a rapid and robust immune response against E. coli FimH.

1: RNA Encoding an Antigenic Polypeptide of E. coli

[0056] In a first aspect, it is provided a coding RNA comprising at least one untranslated region (UTR); and at least one coding sequence encoding an antigenic polypeptide which is selected or derived from Escherichia coli type 1 fimbriae D-mannose specific adhesin (FimH).

[0057] It has to be noted that specific features and embodiments that are described in the context of the first aspect of the disclosure, that is the RNA of the disclosure, are likewise applicable to the second aspect (composition of the disclosure), the third aspect (vaccine of the disclosure), the fourth aspect (kit or kit of parts of the disclosure), or further aspects including medical uses and method of treatments.

[0058] The term “coding RNA” as used herein will be recognized and understood by the person of ordinary skill in the art, and are e.g. intended to refer to an RNA comprising a coding sequence (“cds”) comprising several nucleotide triplets, wherein said cds may be translated into a peptide or protein (e.g. upon administration to a cell or an organism).

[0059] The E. coli FimH of the disclosure may be selected or derived from any strain of Escherichia coli, such as any one of strains E. coli J96, E. coli 536, E. coli CFT073, E. coli UMN026, E. coli CLONE D i14, E. coli CLONE D i2, E. coli IA139, E. coli NA114, E. coli IHE3034, E. coli 789, E. coli F11 and E. coli UTI89.

[0060] In one embodiment, the E. coli FimH of the disclosure comprises or consists of or is derived from the amino acid sequence of SEQ ID NOs: 177-186, 247-256. In one embodiment, the E. coli FimH comprises an amino acid sequence which is identical or at least 70%, 80%, 85%, 86%, 87%, 88%, 89%, 90%, 91%, 92%, 93%, 94%, 95%, 96%, 97%, 98%, or 99% identical to any one of SEQ ID NOs: 177-186, 247-256. In one embodiment, the E. coli FimH is an immunogenic fragment or immunogenic variant of SEQ ID NOs: 177-186, 247-256. In one embodiment, the E. coli FimH comprises an amino acid sequence which is identical or at least 70%, 80%, 85%, 86%, 87%, 88%, 89%, 90%, 91%, 92%, 93%, 94%, 95%, 96%, 97%, 98%, or 99% identical to SEQ ID NO: 177. In one embodiment, the E. coli FimH comprises an amino acid sequence which is identical or at least 70%, 80%, 85%, 86%, 87%, 88%, 89%, 90%, 91%, 92%, 93%, 94%, 95%, 96%, 97%, 98%, or 99% identical to SEQ ID NO: 247.

[0061] In some embodiments, glycosylation sites in the encoded amino acid sequence are mutated/substituted which means that encoded amino acids which may be glycosylated, e.g. after translation of the coding RNA upon in vivo administration, are exchanged to a different amino acid. Accordingly, on nucleic acid level, codons encoding amino acids which are known or predicted to be N-glycosylated or O-glycosylated are substituted with amino acids unsusceptible or less susceptible to glycosylation, e.g., serine (S, Ser), aspartic acid (D, Asp), alanine (A, Ala) or glutamine (Q, Gln).

[0062] N- and/or O-glycosylation can be determined using any suitable means known in the art, for example, using the NetNGlyc 1.0 and NetOGlyc 4.0 Server (accessible at https://services.healthtech.dtu.dk/service.php?NetOGlyc-4.0 and https://services.healthtech.dtu.dk/service.php?NetOGlyc-4.0) using default settings.

[0063] In one embodiment, the antigenic polypeptide does not comprise (or is modified to not comprise) a glycosylation site at one of more of the positions selected from the group consisting of: positions 28, 91, 228, 249, and 256 relative to SEQ ID NO: 177 or at the positions of SEQ ID NOs: 178-186, 247-256 corresponding to those positions of SEQ ID NO: 177. In one embodiment, the polypeptide includes one or more of the following amino acid substitutions relative to SEQ ID NO: 177: N28S, N91D, N249D, N256D, or at the positions of SEQ ID NOs: 178-186, 247-256 corresponding to those positions of SEQ ID NO: 177, for example, one, two, three or four of those amino acid substitutions.

[0064] In various embodiments, the antigenic polypeptide comprises at least one amino acid substitution or mutation to lock the FimH lectin domain in a low mannose binding affinity conformation. In some embodiments in that context, the antigenic polypeptide comprises an amino acid selected from the group consisting of valine (V, Val), isoleucine (I, lie), leucine (L, Leu), glycine (G, Gly), methionine (M, Met) and alanine (A, Ala) at a position corresponding to position 165 of SEQ ID NO: 177 or at the positions of SEQ ID NOs: 178-186, 247-256 corresponding to this position of SEQ ID NO: 177. In one embodiment, the polypeptide comprises a F165V substitution of SEQ ID NO: 177 or at the positions of SEQ ID NOs: 178-186, 247-256 corresponding to this position of SEQ ID NO: 177. Said mutation has been reported in WO2021144369, whose content is incorporated herein by reference, to lock the FimH lectin domain in a low mannose binding affinity conformation.

[0065] In some embodiments, the encoded FimH comprises one or more amino acid substitutions selected from the group consisting of: N28S, V48C, L55C, N91S, N249Q, N256D, F165V, of SEQ ID NO: 177 or at the positions of SEQ ID NOs: 178-186, 247-256 corresponding to these positions of SEQ ID NO: 177; for example the encoded FimH comprises the following amino acid substitutions: N28S, N91S, N249Q; N28S, N91S, N249Q, N256D; N28S, V48C, L55C, N91S, N249Q; or F165V; of SEQ ID NO: 177 or at the positions of SEQ ID NOs: 178-186, 247-256 corresponding to these positions of SEQ ID NO: 177.

[0066] In some embodiments, the encoded FimH comprises one or more amino acid substitutions at positions selected from the group consisting of: F1, P12, G14, G15, G16, A18, P26, V27, V28, Q32, N33, L34, V35, R60, S62, Y64, G65, L68, F71, T86, L107, Y108, L109, V112, S113, A115, G116, V118, A119, A127, L129, Q133, F144, V154, V155, V156, P157, T158, V163 of SEQ ID NO: 247 or at the positions of SEQ ID NOs: 177-186, 248-256 corresponding to these positions of SEQ ID NO: 247.

[0067] In some embodiments, the encoded FimH comprises one or more amino acid substitutions selected from the group consisting of: F1I; F1L; F1V; F1M; F1Y; F1W; P12C; G14C; G15A; G15P; G16A; G16P; A18C; P26C; V27A; V27C; V28C; Q32C; N33C; L34C; L34N; L34S; L34T; L34D; L34E; L34K; L34R; V35C; R60P; S62C; Y64C; G65A; L68C; F71C; T86C; L107C; Y108C; L109C; V112C; S113C; A115V; G116C; V118C; A119C; A119N; A119S; A119T; A119D; A119E; A119K; A119R; A127C; L129C; Q133K; F144C; V154C; V156C; P157C; T158C; V1631; and V1851 of SEQ ID NO: 247 or at the positions of SEQ ID NOs: 177-186, 248-256 corresponding to these positions of SEQ ID NO: 247, or any combination thereof.

[0068] In some embodiments, the encoded FimH comprises the amino acid substitutions selected from the group consisting of: G15A and G16A; P12C and A18C; G14C and F144C; P26C and V35C; P26C and V154C; P26C and V156C; V27C and L34C; V28C and N33C; V28C and P157C; Q32C and Y108C; N33C and L 109C; N33C and P157C; V35C and L 107C; V35C and L 109C; S62C and T86C; S62C and L 129C; Y64C and L68C; Y64C and A 127C; L68C and F71C; V112C and T158C; S113C and G116C; S113C and T158C; V118C and V156C; A119C and V155C; L34N and V27A; L34S and V27A; L34T and V27A; L34D and V27A; L34E and V27A; L34K and V27A; L34R and V27A; A119N and V27A; A119S and V27A; A119T and V27A; A119D and V27A; A119E and V27A; A119K and V27A; A119R and V27A; G15A and V27A; G16A and V27A; G15P and V27A; G16P and V27A; G15A, G16A, and V27A; G65A and V27A; V27A and Q133K; and G15A, G16A, V27A, and Q133K of SEQ ID NO: 247 or at the positions of SEQ ID NOs: 177-186, 248-256 corresponding to these positions of SEQ ID NO: 247.

[0069] In one embodiment, the encoded FimH comprises the amino acid substitutions G15A, G16A and V27A of SEQ ID NO: 247 or at the positions of SEQ ID NOs: 177-186, 248-256 corresponding to these positions of SEQ ID NO: 247.

### Specific Antigen Designs

[0070] According to various embodiments, the coding sequence of the RNA encodes an antigenic polypeptide which is selected or derived from Escherichia coli FimH as defined herein, and one or more further peptide or protein elements. In some embodiments, the one or more further peptide or protein element(s) is heterologous.

[0071] Suitably, the further peptide or protein element may stabilise FimH subunits and/or shield their interactive surfaces (e.g. via a donor strand peptide). Additionally, the further peptide or protein element may promote secretion of the encoded antigenic peptide or protein of the disclosure (e.g. via secretory signal sequences). Additionally, the further peptide or protein element may promote anchoring of the encoded antigenic peptide or protein of the disclosure in the plasma membrane (e.g. via transmembrane elements), or promote formation of antigen complexes (e.g. via multimerization domains or antigen clustering domains).

[0072] Suitably, the coding sequence additionally encodes one or more peptide or protein elements selected from a donor strand peptide, a signal peptide a helper epitope, an antigen clustering domain, or a transmembrane domain. In some embodiments, the coding sequence encodes one or more further peptide or protein elements and a peptide linker.

### Donor Strand Peptides

[0073] In some embodiments, the coding RNA encodes an antigenic protein which is selected or derived from Escherichia coli FimH, and additionally encodes a donor strand peptide.

[0074] In some embodiments, the coding sequences encodes the following elements in N-terminal to C-terminal direction: an antigenic polypeptide which is selected or derived from Escherichia coli FimH; and a donor strand peptide.

[0075] In one embodiment, the donor strand peptide comprises or consists of the amino acid sequence of SEQ ID NO: 338 or SEQ ID NO: 339 or a variant thereof. In one embodiment, the variant of SEQ ID NO: 338 or SEQ ID NO: 339 has from 1 to 5, such as 1, 2, 3 or 4 single amino acid mutations compared to SEQ ID NO: 338 or SEQ ID NO: 339.

[0076] In one embodiment, the donor strand peptide comprises or consists of SEQ ID NO: 338. It may be particularly suitable in the context of the disclosure that the donor strand peptide comprises or consists of SEQ ID NO: 338 so that the polypeptide of the disclosure is in a low mannose binding affinity conformation.

### Peptide Linkers

[0077] In protein constructs composed of several elements, the protein elements are often separated by peptide linkers, which may be beneficial because they allow for a proper folding of the individual elements and thereby the proper functionality of each element.

[0078] When used in the context of the present disclosure, such linkers are particularly useful when encoded by a nucleic acid encoding at least two protein elements, such as an antigenic polypeptide and at least one further peptide or protein element. In that case, the linker is typically located on the polypeptide chain in between the polypeptide of interest and the at least one further protein element. When the coding sequence encodes more than one further peptide or protein elements, a linker can be suitably located between individual further peptide or protein elements. On nucleic acid level, the coding sequence for such linker is typically placed in the reading frame, 5′ or 3′ to the coding sequence for the polypeptide or protein of interest, or placed between coding regions for individual peptide or protein elements.

[0079] In one embodiment, the peptide linker comprises or consists of from 2 to 20 amino acids, from 4 to 15 amino acids, or from 5 to 10 amino acids, for example, 3, 4, 5, 6, 7, 8, 9, 10, 11, 12, 13, 14, 15, 16, 17, 18, 19 or 20 amino acids. Peptide linkers are for example composed of small, non-polar (e.g. Glycine) or polar (e.g. Serine or Threonine) amino acids. The small size of these amino acids provides flexibility, and allows for mobility of the connecting functional domains, as described by Chen et al. (Adv Drug Deliv Reb. 2013; 65(10): 1357-1369). The incorporation of Serine (S, Ser) or Threonine (T, Thr) can maintain the stability of the linker in aqueous solutions by forming hydrogen bonds with the water molecules, and therefore reduces an interaction between the linker and the protein moieties. Rigid linkers generally maintain the distance between the protein domains and they may be based on helical structures and/or they have a sequence that is rich in proline.

[0080] A typical sequence of a flexible linker is composed of repeats of the amino acids Glycine (G, Gly) and Serine (S, Ser). For instance, the linker may have the following sequence: GS, GSG, SGG, SG, GGS, SGS, GSS, SSG. In some embodiments, the same sequence is repeated multiple times (e.g. two, three, four, five or six times) to create a longer linker. In other embodiments, a single amino acid residue such as S or G can be used as a linker.

[0081] On nucleic acid level, particularly RNA level, any nucleotide sequence moiety can be employed that encodes any of linker used in the present disclosure. Owing to the degenerated genetic code, in the case of most polypeptides of SEQ ID NOs: 352-358, more than one particular nucleic acid sequence is conceivable as encoding the respective polypeptide list. While each and every such nucleic acid may generally be used in the context of the present disclosure, it is suitable that the nucleic acid sequence that encodes the polypeptide sequence is selected such that its sequence is codon-optimized according to the general guidance provided in this specification.

[0082] In some embodiments, the coding sequence encodes an antigenic protein which is selected or derived from Escherichia coli FimH, a donor strand peptide, and a peptide linker.

[0083] In one embodiment, the coding sequence encodes the following elements in N-terminal to C-terminal direction: an antigenic polypeptide which is selected or is derived from Escherichia coli FimH; a peptide linker; and a donor strand peptide.

[0084] When the coding sequence encodes the following elements in N-terminal to C-terminal direction: an antigenic polypeptide which is selected or derived from Escherichia coli FimH; a peptide linker; and a donor strand peptide it is particularly suitable that the peptide linker comprises or consists of:
[0085] (i) PGDGN [SEQ ID NO: 352], or a variant or fusion thereof, or
[0086] (ii) GGGGSGG [SEQ ID NO: 353], or a variant or fusion thereof, or
[0087] (iii) GGGGSGGGGSGGGGS [SEQ ID NO: 354], or a variant or fusion thereof, or
[0088] (iv) SGG [SEQ ID NO: 355], or a variant or fusion thereof, or
[0089] (v) SGGM [SEQ ID NO: 356], or a variant or fusion thereof, or
[0090] (vi) GGSGGSGGSGGSGGG [SEQ ID NO: 357], or a variant or fusion thereof, or
[0091] (vii) GGSGGSGGSGGS [SEQ ID NO: 358], or a variant or fusion thereof.

[0092] In one embodiment, the peptide linker is a variant of any one of SEQ ID NOs: 352-358, optionally wherein the variant has from 1 to 5, such as 1, 2, 3 or 4 single amino acid mutations compared to SEQ ID NOs: 352-358.

[0093] In one embodiment the peptide linker comprises or consists of SEQ ID NO: 352. It may be particularly suitable in the context of the disclosure that peptide linker located between the antigenic polypeptide and the donor strand peptide comprises or consists of SEQ ID NO: 352 so that the polypeptide of the disclosure is locked in a low mannose binding affinity conformation.

### Antigenic Polypeptide Conformation

[0094] In one embodiment, the antigenic polypeptide which is selected or derived from E. coli FimH is in a low mannose binding affinity conformation or tense (T) state, for example has a mannose binding affinity of K_{d} of about, 100 μM, 200 μM, 300 μM, 400 μM, 500 μM, 600 μM, 700 μM, 800 μM, 900 μM, or 1 mM or has no detectable mannose binding affinity. In one embodiment, the mannose binding affinity is K_{d}≈300 μM or higher (i.e. has no detectable mannose binding affinity), as disclosed in Kisiela D I, et al. Proc Natl Acad Sci USA. 2013 Nov. 19; 110(47):19089-94 and Sauer M M, et al. J Am Chem Soc. 2019 Jan. 16; 141(2):936-944. It is known in the art that the high mannose binding affinity conformation or relaxed (R) state of FimH corresponds to a mannose binding affinity of for example, K_{d}<1.2 μM.

[0095] Mannose binding can be determined using any suitable means known in the art, for example, surface plasmon resonance may be used to verify binding, binding specificity and binding constants of FimH constructs with Man-BSA and Glc-BSA (negative control), see, for example Rabbani S, et al. J Biol Chem. 2018 Feb. 2; 293(5):1835-1849, which is incorporated by reference herein.

[0096] The conformation of FimH can also be assessed by measuring the binding of conformational antibodies, using any suitable means known in the art, for example, surface plasmon resonance. Exemplary antibodies are capable of recognising epitopes differently overlapping the mannose-binding pocket of FimH, for example antibodies binding to epitopes overlapping with the mannose binding pocket, for example epitopes limited to just one loop of the mannose-binding pocket.

[0097] Exemplary antibodies are those disclosed in WO2016183501, or in Kisiela D I, et al. Proc Natl Acad Sci USA. 2013 Nov. 19; 110(47):19089-94, Kisiela D I, et al. PLoS Pathog. 2015 May 14; 11(5):e1004857 and which are incorporated by reference herein. In one embodiment, the conformational antibody has a variable heavy chain (VH) sequence of SEQ ID NO: 173 and a variable light chain (VL) sequence of SEQ ID NO: 174. In one embodiment, the conformational antibody has a variable heavy chain (VH) sequence of SEQ ID NO: 175 and a variable light chain (VL) sequence of SEQ ID NO: 176.

### Signal Peptides

[0098] In some embodiments, the coding sequence of the disclosure encodes at least one antigenic polypeptide which is selected or derived from Escherichia coli FimH, and additionally encodes a signal peptide.

[0099] Suitably, the signal peptide is selected or derived from FimH, FimC, immunoglobulin Kappa (IgK), immunoglobulin E (IgE), tissue plasminogen activator (TPA or HsPLAT), or human serum albumin (HSA or HsALB), or MHC class I lymphocyte antigen (HLA-A2).

[0100] In some embodiments, the signal peptide is selected or derived from IgE, IgK, FimH, FimC, TPA, HSA, or HLA-A2, wherein the amino acid sequences of said signal peptides is identical or at least 70%, 80%, 85%, 86%, 87%, 88%, 89%, 90%, 91%, 92%, 93%, 94%, 95%, 96%, 97%, 98%, or 99% identical to any one of amino acid sequences SEQ ID NOs: 394-400, or fragment or variant of any of these.

[0101] In some embodiments, the signal peptide is heterologous. In some embodiments, the signal peptide is selected or derived from IgE or IgK, wherein the amino acid sequences of said signal peptides is identical or at least 70%, 80%, 85%, 86%, 87%, 88%, 89%, 90%, 91%, 92%, 93%, 94%, 95%, 96%, 97%, 98%, or 99% identical to any one of amino acid sequences SEQ ID NOs: 394, 395, or fragment or variant of any of these.

[0102] In embodiments where the coding sequence of the disclosure additionally encodes a signal peptide, it is particularly suitable to generate a fusion protein comprising an N-terminal signal peptide and a C-terminal peptide or protein which is selected or derived from Escherichia coli FimH, optionally comprising a peptide linker and a donor strand peptide, wherein said C-terminal peptide or protein which is selected or derived from Escherichia coli FimH is for example lacking an endogenous N-terminal secretory signal peptide, such as SEQ ID NOs: 247-256 and 1277.

[0103] Constructs comprising an N-terminal signal peptide may ideally improve the secretion of the Escherichia coli FimH (that is encoded by the coding RNA of the first aspect). Accordingly, improved secretion of the Escherichia coli FimH, upon administration of the coding RNA of the first aspect, may be advantageous for the induction of humoral immune responses against the encoded Escherichia coli FimH antigenic protein.

[0104] Further suitable signal peptides may be selected from the list of amino acid sequences according to SEQ ID NOs: 1-1115 and SEQ ID NO: 1728 of published PCT patent application WO2017081082, which is incorporated by reference herein, or fragments or variants of these sequences, wherein said secretory signal peptides are N-terminally fused to the antigenic polypeptide which is selected or derived from Escherichia coli FimH or an immunogenic fragment or immunogenic variant thereof, lacking the endogenous secretory signal sequence.

[0105] Suitable examples of constructs comprising an N-terminal signal sequence are SEQ ID NOs: 498-520. The corresponding nuclei acid sequences for each of the above listed constructs can be found in Table 1.

### Antigen Clustering Domains or Multimerization Domains

[0106] In various embodiments, the coding sequence of the disclosure encodes an antigenic polypeptide which is selected or derived from Escherichia coli FimH, and additionally encodes an antigen clustering domain or multimerization domain.

[0107] Suitably, the antigen clustering domain (multimerization domain) is selected or derived from ferritin or lumazine synthase (LS, LumSynth).

[0108] In embodiments where the coding sequence of the disclosure additionally encodes an antigen clustering domain, it is particularly suitable to generate a fusion protein comprising an antigenic polypeptide which is selected or derived from Escherichia coli FimH—optionally comprising a donor strand peptide and a (first) peptide linker—further comprising an antigen clustering domain, and optionally a (second) peptide linker. Constructs comprising an antigen clustering domain may enhance the antigen clustering and may therefore promote immune responses e.g. by multiple binding events that occur simultaneously between the clustered antigens and the host cell receptors (see further details in Lopez-Sagaseta, Jacinto, et al. “Self-assembling protein nanoparticles in the design of vaccines”. Computational and structural biotechnology journal 14 (2016):58-68). Additionally, such constructs may additionally comprise an N-terminal signal sequence (as defined above).

[0109] Lumazine synthase (LS, LumSynth) is an enzyme with particle-forming properties, present in a broad variety of organisms and involved in riboflavin biosynthesis. Jardine et al. reported their attempts to enhance the immunoreactivity of recombinant gp120 against HIV infection through the inclusion of Lumazine synthase (LS, LumSynth) for the optimization of vaccine candidates (Jardine, Joseph, et al. “Rational HIV immunogen design to target specific germline B cell receptors”. Science 340.6133 (2013):711-716). A construct comprising Lumazine synthase allows the formation of multimeric nanoparticles, particularly 60-mer nanoparticles, displaying the antigenic polypeptide and thus optimizes B-cell activation.

[0110] In some embodiments, lumazine-synthase is used to promote the antigen clustering and may therefore promote immune responses of the coding sequence encoding the E. coli FimH antigen.

[0111] In some embodiments, the antigen clustering domain (multimerization domain) is selected or derived from lumazine-synthase (LS, LumSynth), wherein the amino acid sequences of said antigen clustering domain is identical or at least 70%, 80%, 85%, 86%, 87%, 88%, 89%, 90%, 91%, 92%, 93%, 94%, 95%, 96%, 97%, 98%, or 99% identical to any one of amino acid sequences (SEQ ID NOs: 443, 444), a fragment or variant of any of these.

[0112] Ferritin is a protein whose main function is intracellular iron storage. Almost all living organisms produce ferritin which is made of 24 subunits that self-assemble in a quaternary structure with octahedral symmetry. Its properties to self-assemble into nanoparticles are well-suited to carry and expose antigens.

[0113] In some embodiments, ferritin is used to promote the antigen clustering and may therefore promote immune responses of the RNA encoding the E. coli FimH antigen.

[0114] In some embodiments, the antigen clustering domain (multimerization domain) is or is derived from ferritin wherein the amino acid sequences of said antigen clustering domain is identical or at least 70%, 80%, 85%, 86%, 87%, 88%, 89%, 90%, 91%, 92%, 93%, 94%, 95%, 96%, 97%, 98%, or 99% identical to any one of amino acid sequences (SEQ ID NO: 457-459), a fragment or variant of any of these.

[0115] In some embodiments, the coding sequence encodes the following elements in N-terminal to C-terminal direction: an optional signal peptide, an antigen clustering domain which is selected or derived from lumazine synthase or ferritin as defined herein, a (second) peptide linker, and an antigenic polypeptide which is selected or derived from E. coli FimH, optionally further comprising a (first) peptide linker, and a donor strand peptide as defined herein.

[0116] In some alternative embodiments, the coding sequence encodes the following elements in N-terminal to C-terminal direction: an optional signal peptide, an antigenic polypeptide which is selected or derived from E. coli FimH, optionally comprising a (first) peptide linker and a donor strand peptide, a (second) peptide linker, and an antigen clustering domain which is suitably selected or derived from lumazine synthase or ferritin as defined herein.

[0117] In one embodiment, the (first) peptide linker comprises or consists of any one of SEQ ID NOs: 352-354 or a variant thereof, optionally wherein the variant has from 1 to 5, such as 1, 2, 3 or 4 single amino acid mutations compared to SEQ ID NOs: 352-354. In one embodiment, the (first) peptide linker comprises or consists of SEQ ID NO: 352. In one embodiment, the (second) peptide linker comprises or consists of any one of SEQ ID NO: 355-358 or a variant thereof, optionally wherein the variant has from 1 to 5, such as 1, 2, 3 or 4 single amino acid mutations compared to SEQ ID NOs: 355-358. In one embodiment, the (second) peptide linker comprises or consists of SEQ ID NO: 355.

[0118] Suitable examples of constructs comprising a heterologous antigen clustering domain are SEQ ID NOs: 507-510, 512-520. The corresponding nucleic acid sequences for each of the above listed constructs can be found in Table 1.

[0119] In various embodiments, the coding sequence of the disclosure encodes an antigenic polypeptide which is selected or derived from Escherichia coli FimH, and additionally encodes a transmembrane domain. In one embodiment the transmembrane domain is heterologous. A heterologous transmembrane domain promotes membrane anchoring of the encoded E. coli FimH antigenic polypeptide, and may thereby enhance the immune response (in particular cellular immune responses).

[0120] Suitably, the transmembrane domain is or is derived from an influenza HA transmembrane domain, for example derived from an influenza A HA H1N1, more for example from H1N1/A/Netherlands/602/2009, HA, aa521-566, GenBankAcc. No.: ACQ45338.1, (SEQ ID NO: 478).

[0121] Further suitable transmembrane domains are derived from Human immunodeficiency virus 1, Env, aa19-35, BAF32550.1, AB253679.1; Human immunodeficiency virus 1, Env, aa515-536, BAF32550.1, AB253679.1; Human immunodeficiency virus 1, Env, aa680-702, BAF32550.1, AB253679.1; Equine infectious anemia virus, Env, aa450-472, AAC03762.1, AF016316.1; Equine infectious anemia virus, Env, aa614-636, AAC03762.1, AF016316.1; Equine infectious anemia virus, Env, aa798-819, AAC03762.1, AF016316.1; Murine leukemia virus, Env, aa601-623, AAA46526.1, M93052.1; Mouse mammary tumor virus, Env, aa457-479, BAA03768.1, D16249.1; Mouse mammary tumor virus, Env, aa624-646, NP_056883.1, NC_001503.1; Vesicular stomatitis virus, G, aa477-499, CAA24525.1, V01214.1; Rabies virus, G, aa460-479, AEV43288.1, JN234423.1 (Env: Envelope glycoprotein; G: glycoprotein).

[0122] In embodiments where the coding sequence of the disclosure additionally encodes a heterologous transmembrane domain, it is particularly suitable to generate a fusion protein comprising an N-terminal peptide or protein comprising an antigenic polypeptide which is selected or derived from Escherichia coli FimH, optionally comprising a donor strand peptide and a (first) peptide linker (as defined above) between the antigenic polypeptide and the donor strand peptide; and a C-terminal heterologous transmembrane domain, and optionally a (second) peptide linker (as defined above) between the N-terminal peptide and the C-terminal peptide. Constructs comprising heterologous transmembrane domain may promote membrane anchoring of the antigen and may therefore promote immune responses, in particular cellular immune responses, of the RNA encoding the antigenic polypeptide. Additionally, such constructs may additionally comprise an N-terminal secretory signal sequence (as defined above). Alternatively, the transmembrane domain may be in the N-terminus.

[0123] Further transmembrane elements/domains may be selected from the list of amino acid sequences according to SEQ ID NOs: 1228-1343 of the patent application WO2017081082, or fragments or variants of these sequences, which is incorporated by reference herein.

[0124] In some embodiments, the coding sequence encodes the following elements in N-terminal to C-terminal direction: a secretory signal peptide, an antigenic polypeptide which is selected or derived from Escherichia coli FimH, optionally comprising a (first) peptide linker and a donor strand peptide, a (second) peptide linker, and a heterologous transmembrane domain.

[0125] A suitable example of a construct comprising a heterologous transmembrane element is SEQ ID NO: 511. The corresponding nucleic acid sequence for the construct can be found in Table 1.

[0126] In various embodiments of the invention, the coding sequence encodes the following elements for example in N-terminal to C-terminal direction:
[0127] a) a signal peptide, the antigenic polypeptide as defined herein;
[0128] b) a signal peptide, the antigenic polypeptide as defined herein, a peptide linker, a donor strand peptide;
[0129] c) an antigen clustering domain, a peptide linker, the antigenic polypeptide as defined herein, a peptide linker, a donor strand peptide;
[0130] d) a signal peptide, an antigen clustering domain, a peptide linker, the antigenic polypeptide as defined herein, a peptide linker, a donor strand peptide;
[0131] e) a signal peptide, the antigenic polypeptide as defined herein, a peptide linker, a donor strand peptide, a peptide linker, an antigen clustering domain; or
[0132] f) a signal peptide, the antigenic polypeptide as defined herein, a peptide linker, a donor strand peptide, a peptide linker, a transmembrane domain.

[0133] In some embodiments, the coding sequence encodes the following elements for example in N-terminal to C-terminal direction: a signal peptide, the antigenic polypeptide as defined herein, a peptide linker, and a donor strand peptide; optionally wherein the signal peptide is selected from SEQ ID NOs: 394-400, optionally wherein the signal peptide is SEQ ID NO: 395; the antigenic polypeptide is selected from SEQ ID NOs: 247-256, optionally wherein the antigenic polypeptide is SEQ ID NO: 247; the peptide linker is selected from SEQ ID NOs: 352-354, optionally wherein the peptide linker is SEQ ID NO: 352; the donor strand peptide is selected from SEQ ID NOs: 338, 339, optionally wherein the donor strand peptide is SEQ ID NO: 338.

[0134] In some embodiments, the coding sequence encodes the following elements for example in N-terminal to C-terminal direction: a signal peptide, the antigenic polypeptide as defined herein, a (first) peptide linker, a donor strand peptide, a (second) peptide linker; and an antigen clustering domain; optionally wherein the signal peptide is selected from SEQ ID NOs: 394-400, optionally wherein the signal peptide is SEQ ID NO: 394; the antigenic polypeptide is selected from SEQ ID NOs: 247-256, optionally wherein the antigenic polypeptide is SEQ ID NO: 247; the (first) peptide linker is selected from SEQ ID NOs: 352-354, optionally wherein the (first) peptide linker is SEQ ID NO: 352; the donor strand peptide is selected from SEQ ID NOs: 338, 339, optionally wherein the donor strand peptide is SEQ ID NO: 338; the (second) peptide linker is selected from SEQ ID NOs: 355-358, optionally wherein the (second) peptide linker is SEQ ID NO: 355; the antigen clustering domain is selected from SEQ ID NOs: 443, 444, 457-459, optionally wherein the peptide linker is SEQ ID NOs: 444 or 459.

[0135] Suitable sequences as defined above are provided in Table 1. Therein, each row corresponds to a suitable sequence. Column A of Table 1 provides a short description of suitable antigen constructs. Column B of Table 1 provides protein (amino acid) SEQ ID NOs of respective antigen constructs. Column C of Table 1 provides SEQ ID NO of the corresponding wild type or reference nucleic acid coding sequences. Column D of Table 1 provides SEQ ID NO of the corresponding G/C optimized nucleic acid coding sequences (opt1, gc). Column E of Table 1 provides SEQ ID NO of the corresponding human codon usage adapted nucleic acid coding sequences (opt3, human). Column F of Table 1 provides SEQ ID NO of further codon optimized coding sequences (opt4, main or opt5, gc mod).

[0136] Notably, the description explicitly includes the information provided under “feature key”, i.e. “source” (for nucleic acids or proteins) or “misc_feature” (for nucleic acids) or “REGION” (for proteins) of the ST.26 sequence listing of the present application. RNA constructs comprising coding sequences of Table 1, e.g. mRNA sequences comprising the coding sequences of Table 1 are provided in Table 3.

TABLE 1
Sequences (amino acid sequences and coding sequences).

| row | A | B | C | D | E | F |
|---|---|---|---|---|---|---|
| 1 | Ec(J96)-FimC(1- | 496 | | 521, 546 | 571, 596 | 621, 646 |
| | 36)_Ec(J96)- | | | | | |
| | FimC(37-241); | | | | | |
| | construct #1 | | | | | |
| 2 | HslgE(1-18)_Ec(J96)- | 497 | | 522, 547 | 572, 597 | 622, 647 |
| | FimC(37-241); | | | | | |
| | construct #2 | | | | | |
| 3 | Ec(J96)-FimH(1-21)_ | 498 | | 523, 548 | 573, 598 | 623, 648 |
| | Ec(J96)-FimH(22-300); | | | | | |
| | construct #3 | | | | | |
| 4 | HslgE(1-18)_Ec(J96)- | 499 | | 524, 549 | 574, 599 | 624, 649 |
| | FimH(22-300); | | | | | |
| | construct #4 | | | | | |
| 5 | MmlgK(1-20)_Ec(J96)- | 500 | | 525, 550 | 575, 600 | 625, 650 |
| | FimH(22-300); | | | | | |
| | construct #5 | | | | | |
| 6 | Ec(J96)-FimH(1- | 501 | | 526, 551 | 576, 601 | 626, 651 |
| | 21)_Ec(J96)- | | | | | |
| | FimH(22-300)_Linker- | | | | | |
| | PGDGN_Ec(J96)- | | | | | |
| | FimG(24-37); | | | | | |
| | construct #6 | | | | | |
| 7 | HslgE(1-18)_Ec(J96)- | 502 | | 527, 552 | 577, 602 | 627, 652 |
| | FimH(22-300)_Linker- | | | | | |
| | PGDGN_Ec(J96)- | | | | | |
| | FimG(24-37); | | | | | |
| | construct #7 | | | | | |
| 8 | HslgE(1-18)_Ec(J96)- | 503 | | 528, 553 | 578, 603 | 628, 653 |
| | FimH(22-300)_Linker- | | | | | |
| | G4SGG_Ec(J96)- | | | | | |
| | FimG(24-37); | | | | | |
| | construct #8 | | | | | |
| 9 | MmlgK(1-20)_Ec(J96)- | 504 | | 529, 554 | 579, 604 | 629, 654 |
| | FimH(22-300)_Linker- | | | | | |
| | PGDGN_Ec(J96)- | | | | | |
| | FimG(24-37); | | | | | |
| | construct #9 | | | | | |
| 10 | MmlgK(1-20)_Ec(536)- | 505 | | 530, 555 | 580, 605 | 630, 655 |
| | FimH(22-300)_Linker- | | | | | |
| | PGDGN_Ec(J96)- | | | | | |
| | FimG(24-37); | | | | | |
| | construct #10 | | | | | |
| 11 | HslgE(1-18)_Ec(J96)- | 506 | | 531, 556 | 581, 606 | 631, 656 |
| | FimH(22-300)_Linker- | | | | | |
| | (G4S)3_Ec(J96)- | | | | | |
| | FimC(135-148); | | | | | |
| | construct #11 | | | | | |
| 12 | LumSynth(1-154_C37A_ | 507 | | 532, 557 | 582, 607 | 632, 657 |
| | N102D)_Linker(GGS)4- | | | | | |
| | GGG_Ec(J96)-FimH(22- | | | | | |
| | 300)_Linker- | | | | | |
| | PGDGN_Ec(J96)- | | | | | |
| | FimG(24-37); | | | | | |
| | construct #12 | | | | | |
| 13 | HslgE(1-18)_Ec(J96)- | 508 | | 533, 558 | 583, 608 | 633, 658 |
| | FimH(22-300)_Linker- | | | | | |
| | PGDGN_Ec(J96)- | | | | | |
| | FimG(24-37)_Linker- | | | | | |
| | SGG_LumSynth(1- | | | | | |
| | 154_C37A_N102D); | | | | | |
| | construct #13 | | | | | |
| 14 | HslgE(1-18)_Ec(J96)- | 509 | | 534, 559 | 584, 609 | 634, 659 |
| | FimH(22-300)_Linker- | | | | | |
| | PGDGN_Ec(J96)- | | | | | |
| | FimG(24-37)_Linker- | | | | | |
| | SGG_Ferritin(5- | | | | | |
| | 167_N19Q); | | | | | |
| | construct #14 | | | | | |
| 15 | MmlgK(1-20)_Ec(J96)- | 510 | | 535, 560 | 585, 610 | 635, 660 |
| | FimH(22-300)_Linker- | | | | | |
| | PGDGN_Ec(J96)- | | | | | |
| | FimG(24-37)_Linker- | | | | | |
| | (GGS)4_Ferritin(5-166); | | | | | |
| | construct #15 | | | | | |
| 16 | HslgE(1-18)_Ec(J96)- | 511 | | 536, 561 | 586, 611 | 636, 661 |
| | FimH(22-300)_Linker- | | | | | |
| | PGDGN_Ec(J96)- | | | | | |
| | FimG(24-37)_ | | | | | |
| | TMdomain- | | | | | |
| | HA(510-566); | | | | | |
| | construct #16 | | | | | |
| 17 | HslgE(1-18)_ | 512 | | 537, 562 | 587, 612 | 637, 662 |
| | LumSynth(1- | | | | | |
| | 154_C37A_N102D)_ | | | | | |
| | Linker(GGS)4- | | | | | |
| | GGG_Ec(J96)-FimH(22- | | | | | |
| | 300)_Linker- | | | | | |
| | PGDGN_Ec(J96)- | | | | | |
| | FimG(24-37); | | | | | |
| | construct #17 | | | | | |
| 18 | HslgE(1-18)_Ec(J96)- | 513 | | 538, 563 | 588, 613 | 638, 663 |
| | FimH(22-300_N28S_ | | | | | |
| | N91S_N249Q)_Linker- | | | | | |
| | PGDGN_Ec(J96)- | | | | | |
| | FimG(24-37)_Linker- | | | | | |
| | SGG_LumSynth(1- | | | | | |
| | 154_C37A_N102D); | | | | | |
| | construct #18 | | | | | |
| 19 | HslgE(1-18)_Ec(J96)- | 514 | | 539, 564 | 589, 614 | 639, 664 |
| | FimH(22-300_N28S_ | | | | | |
| | N91S_N249Q_N256D)_ | | | | | |
| | Linker-PGDGN_Ec(J96)- | | | | | |
| | FimG(24-37)_Linker- | | | | | |
| | SGG_LumSynth(1- | | | | | |
| | 154_C37A_N102D); | | | | | |
| | construct #19 | | | | | |
| 20 | HslgE(1-18)_Ec(J96)- | 515 | | 540, 565 | 590, 615 | 640, 665 |
| | FimH(22- | | | | | |
| | 300_N28S_V48C_ | | | | | |
| | L55C_N91S_N249Q)_ | | | | | |
| | Linker-PGDGN_Ec(J96)- | | | | | |
| | FimG(24-37)_Linker- | | | | | |
| | SGG_LumSynth(1- | | | | | |
| | 154_C37A_N102D); | | | | | |
| | construct #20 | | | | | |
| 21 | HslgE(1-18)_Ec(J96)- | 516 | | 541, 566 | 591, 616 | 641, 666 |
| | FimH(22-300_F165V)_ | | | | | |
| | Linker-PGDGN_ | | | | | |
| | Ec(J96)-FimG(24- | | | | | |
| | 37)_Linker-SGG_ | | | | | |
| | LumSynth(1- | | | | | |
| | 154_C37A_N102D); | | | | | |
| | construct #21 | | | | | |
| 22 | HslgE(1-18)_Ec(J96)- | 517 | | 542, 567 | 592, 617 | 642, 667 |
| | FimH(22-300_N28S_ | | | | | |
| | N91S_N249Q)_Linker- | | | | | |
| | PGDGN_Ec(J96)- | | | | | |
| | FimG(24-37)_Linker- | | | | | |
| | SGG_Ferritin(5- | | | | | |
| | 167_N19Q); | | | | | |
| | construct #22 | | | | | |
| 23 | HslgE(1-18)_Ec(J96)- | 518 | | 543, 568 | 593, 618 | 643, 668 |
| | FimH(22-300_ | | | | | |
| | N28S_N91S_ | | | | | |
| | N249Q_N256D)_Linker- | | | | | |
| | PGDGN_Ec(J96)- | | | | | |
| | FimG(24-37)_Linker- | | | | | |
| | SGG_Ferritin(5- | | | | | |
| | 167_N19Q); | | | | | |
| | construct #23 | | | | | |
| 24 | HslgE(1-18)_Ec(J96)- | 519 | | 544, 569 | 594, 619 | 644, 669 |
| | FimH(22- | | | | | |
| | 300_N28S_V48C_ | | | | | |
| | L55C_N91S_N249Q)_ | | | | | |
| | Linker-PGDGN_Ec(J96)- | | | | | |
| | FimG(24-37)_Linker- | | | | | |
| | SGG_Ferritin(5- | | | | | |
| | 167_N19Q); | | | | | |
| | construct #24 | | | | | |
| 25 | HslgE(1-18)_ | 520 | | 545,570 | 595, 620 | 645, 670 |
| | Ec(J96)-FimH(22- | | | | | |
| | 300_F165V)_Linker- | | | | | |
| | PGDGN_Ec(J96)- | | | | | |
| | FimG(24-37)_Linker- | | | | | |
| | SGG_Ferritin(5- | | | | | |
| | 167_N19Q); | | | | | |
| | construct #25 | | | | | |
| 26 | Ec(J96)-FimH | 177 | 187 | 197, 207 | 217 | 227, 237 |
| 27 | Ec(536)-FimH | 178 | 188 | 198, 208 | 218 | 228, 238 |
| 28 | Ec(CFT073)-FimH | 179 | 189 | 199, 209 | 219 | 229, 239 |
| 29 | Ec(IHE3034)-FimH | 180 | 190 | 200, 210 | 220 | 230, 240 |
| 30 | Ec(NA114)-FimH | 181 | 191 | 201, 211 | 221 | 231, 241 |
| 31 | Ec(F11)-FimH | 182 | 192 | 202, 212 | 222 | 232, 242 |
| 32 | Ec(J96)-FimH(N28S_ | 183 | 193 | 203, 213 | 223 | 233, 243 |
| | N91S_N249Q) | | | | | |
| 33 | Ec(J96)- | 184 | 194 | 204, 214 | 224 | 234, 244 |
| | FimH(N28S_N91S_ | | | | | |
| | N249Q_N256D) | | | | | |
| 34 | Ec(J96)- | 185 | 195 | 205, 215 | 225 | 235, 245 |
| | FimH(N28S_V48C_ | | | | | |
| | L55C_N91S_N249Q) | | | | | |
| 35 | Ec(J96)-FimH(F165V) | 186 | 196 | 206, 216 | 226 | 236, 246 |
| 36 | Ec(J96)-FimH(22-300) | 247 | 257 | 267, 277 | 287 | 297, 307 |
| 37 | Ec(536)-FimH(22-300) | 248 | 258 | 268, 278 | 288 | 298, 308 |
| 38 | Ec(CFT073)- | 249 | 259 | 269, 279 | 289 | 299, 309 |
| | FimH(22-300) | | | | | |
| 39 | Ec(IHE3034)- | 250 | 260 | 270, 280 | 290 | 300, 310 |
| | FimH(22-300) | | | | | |
| 40 | Ec(NA114)- | 251 | 261 | 271, 281 | 291 | 301, 311 |
| | FimH(22-300) | | | | | |
| 41 | Ec(F11)-FimH(22-300) | 252 | 262 | 272, 282 | 292 | 302, 312 |
| 42 | Ec(J96)-FimH(22- | 253 | 263 | 273, 283 | 293 | 303, 313 |
| | 300_N28S_N91S_ | | | | | |
| | N249Q) | | | | | |
| 43 | Ec(J96)-FimH(22- | 254 | 264 | 274, 284 | 294 | 304, 314 |
| | 300_N28S_N91S_ | | | | | |
| | N249Q_N256D) | | | | | |
| 44 | Ec(J96)-FimH(22-300_ | 255 | 265 | 275, 285 | 295 | 305, 315 |
| | N28S_V48C_L55C_ | | | | | |
| | N91S_N249Q) | | | | | |
| 45 | Ec(J96)-FimH(22- | 256 | 266 | 276, 286 | 296 | 306, 316 |
| | 300_F165V) | | | | | |
| 46 | Ec(J96)-FimC | 317 | 318 | 319, 320 | 321 | 322, 323 |
| 47 | Ec(J96)-FimC(37-241) | 324 | 325 | 326, 327 | 328 | 329, 330 |
| 48 | Ec(J96)-FimG | 331 | 332 | 333, 334 | 335 | 336, 337 |
| 49 | Ec(J96)-FimG(24-37); | 338 | 340 | 342, 344 | 346 | 348, 350 |
| | FimG donor | | | | | |
| | strand, G-peptide | | | | | |
| 50 | Ec(J96)-FimC(135-148); | 339 | 341 | 343, 345 | 347 | 349, 351 |
| | FimC donor | | | | | |
| | strand, C-peptide | | | | | |
| 51 | Linker-PGDGN | 352 | | 359, 366 | 373 | 380, 387 |
| 52 | Linker-G4SGG | 353 | | 360, 367 | 374 | 381, 388 |
| 53 | Linker-(G4S)3 | 354 | | 361, 368 | 375 | 382, 389 |
| 54 | Linker-SGG | 355 | | 362, 369 | 376 | 383, 390 |
| 55 | Linker-SGGM | 356 | | 363, 370 | 377 | 384, 391 |
| 56 | Linker-(GGS)4-GGG | 357 | | 364, 371 | 378 | 385, 392 |
| 57 | Linker-(GGS)4 | 358 | | 365, 372 | 379 | 386, 393 |
| 58 | SignalPeptide- | 394 | 401 | 408, 415 | 422 | 429, 436 |
| | HslgE(1-18) | | | | | |
| 59 | SignalPeptide- | 395 | 402 | 409, 416 | 423 | 430, 437 |
| | MmlgK(1-20) | | | | | |
| 60 | SignalPeptide-Ec(J96)- | 396 | 403 | 410, 417 | 424 | 431, 438 |
| | FimH(1-21) | | | | | |
| 61 | SignalPeptide-Ec(J96)- | 397 | 404 | 411, 418 | 425 | 432, 439 |
| | FimC(1-36) | | | | | |
| 62 | SignalPeptide- | 398 | 405 | 412, 419 | 426 | 433, 440 |
| | HsPLAT(1-22) | | | | | |
| 63 | SignalPeptide- | 399 | 406 | 413, 420 | 427 | 434, 441 |
| | HsALB(1-18) | | | | | |
| 64 | SignalPeptide-HsHLA- | 400 | 407 | 414, 421 | 428 | 435, 442 |
| | A2(1-24) | | | | | |
| 65 | LumSynth(1-154); | 443 | 445 | 447,449 | 451 | 453, 455 |
| | Aa(VF5)-ribH(1-154) | | | | | |
| 66 | LumSynth(1-154_ | 444 | 446 | 448, 450 | 452 | 454, 456 |
| | C37A_N102D); | | | | | |
| | Aa(VF5)-ribH(1- | | | | | |
| | 154_C37A_N102D) | | | | | |
| 67 | Ferritin(5-167); | 457 | 460 | 463, 466 | 469 | 472, 475 |
| | Hp(J99)-pfr(5-167) | | | | | |
| 68 | Ferritin(5-166); | 458 | 461 | 464, 467 | 470 | 473, 476 |
| | Hp(J99)-pfr(5-166) | | | | | |
| 69 | Ferritin(5-167_N19Q); | 459 | 462 | 465, 468 | 471 | 474, 477 |
| | Hp(J99)-pfr(5- | | | | | |
| | 167_N19Q) | | | | | |
| 70 | TMdomain-HA(510-566) | 478 | 490 | 491, 492 | 493 | 494, 495 |
| 71 | TMdomain-Env(19-35) | 479 | | | | |
| 72 | TMdomain-Env(515-536) | 480 | | | | |
| 73 | TMdomain-Env(680-702) | 481 | | | | |
| 74 | TMdomain-Env(450-472) | 482 | | | | |
| 75 | TMdomain-Env(614-636) | 483 | | | | |
| 76 | TMdomain-Env(798-819) | 484 | | | | |
| 77 | TMdomain-Env(601-623) | 485 | | | | |
| 78 | TMdomain-Env(457-479) | 486 | | | | |
| 79 | TMdomain-Env(624-646) | 487 | | | | |
| 80 | TMdomain-G(477-499) | 488 | | | | |
| 81 | TMdomain-G(460-479) | 489 | | | | |
| 82 | mAb-926_VH | 173 | | | | |
| 83 | mAb-926_VL(kappa) | 174 | | | | |
| 84 | mAb-475_VH | 175 | | | | |
| 85 | mAb-475_VL(kappa) | 176 | | | | |
| 86 | Ec(J96)-FimH(22- | 1277 | | | | |
| | 300_N28S_G36A_ | | | | | |
| | G37A_V48S_N91S_ | | | | | |
| | N249Q)_Linker- | | | | | |
| | GGSSGGG_Ec(J96)- | | | | | |
| | FimG(24-37) | | | | | |

Aa: Aquifex aeolicus; Ec: Escherichia coli; Env: Envelope glycoprotein; G: Glycoprotein; HA: Hemagglutinin; Hp: Helicobacter pylori; Hs: Homo sapiens; IgE: immunoglobulin E; IgK: immunoglobulin Kappa; LumSynth, LS: Lumazine synthase; Mm: Mus musculus; TMdomain, TM: transmembrane domain

### Suitable Coding Sequences:

[0137] According to some embodiments, the coding RNA of the disclosure comprises a coding sequence encoding an antigenic polypeptide which is selected or derived from an Escherichia coli FimH as defined herein, or fragments and variants thereof. In that context, any coding sequence encoding at least one antigenic protein as defined herein, or fragments and variants thereof may be understood as suitable coding sequence and may therefore be comprised in the nucleic acid of the disclosure.

[0138] In some embodiments, the coding RNA of the first aspect comprises or consists of a coding sequence encoding an antigenic polypeptide which is selected or derived from Escherichia coli FimH as defined herein, for example encoding any one of SEQ ID NOs: 177-186, 247-256, 498-520, 1277, or fragments of variants thereof. It has to be understood that, on RNA level, any sequence which encodes an amino acid sequences being identical or at least 70%, 80%, 85%, 86%, 87%, 88%, 89%, 90%, 91%, 92%, 93%, 94%, 95%, 96%, 97%, 98%, or 99% identical to any one of SEQ ID NOs: 177-186, 247-256, 498-520, 1277, or fragments or variants thereof, may be selected and may accordingly be understood as suitable coding sequence of the disclosure.

[0139] In some embodiments, the coding sequence encodes an amino acid sequence which is identical or at least 70%, 80%, 85%, 86%, 87%, 88%, 89%, 90%, 91%, 92%, 93%, 94%, 95%, 96%, 97%, 98%, or 99% identical to any one of SEQ ID NOs: 498-520, 1277 or an immunogenic fragment or immunogenic variant thereof.

[0140] In some embodiments, the coding sequence encodes an amino acid sequence which is identical or at least 90%, 91%, 92%, 93%, 94%, 95%, 96%, 97%, 98%, or 99% identical to any one of SEQ ID NOs: 504, 508, and 509, or an immunogenic fragment or immunogenic variant thereof.

[0141] In some embodiments, the coding RNA of the first aspect comprises a coding sequence that comprises at least one of the nucleic acid sequences being identical or at least 70%, 80%, 85%, 86%, 87%, 88%, 89%, 90%, 91%, 92%, 93%, 94%, 95%, 96%, 97%, 98%, or 99% identical to the sequences according to any one of SEQ ID NOs: 187-246, 257-316, 523-545, 548-570, 573-595, 598-620, 623-645, 648-670, or a fragment or variant of any of these sequences.

[0142] In some embodiments, the coding RNA of the first aspect comprises a coding sequence that comprises at least one of the nucleic acid sequences being identical or at least 70%, 80%, 85%, 86%, 87%, 88%, 89%, 90%, 91%, 92%, 93%, 94%, 95%, 96%, 97%, 98%, or 99% identical to the sequences according to any one of SEQ ID NOs: 523-545, 548-570, 573-595, 598-620, 623-645, 648-670, or a fragment or variant thereof.

[0143] In some embodiments, the coding RNA of the first aspect comprises a coding sequence that comprises at least one of the nucleic acid sequences being identical or at least 70%, 80%, 85%, 86%, 87%, 88%, 89%, 90%, 91%, 92%, 93%, 94%, 95%, 96%, 97%, 98%, or 99% identical to the sequences according to any one of SEQ ID NOs: 529, 533, 534, 554, 558, 559, 579, 583, 584, 604, 608, 609, 629, 633, 634, 654, 658, 659, or a fragment or variant of any of these sequences.

[0144] In some embodiments, the coding RNA of the first aspect is an artificial RNA.

[0145] The term “artificial RNA” as used herein is intended to refer to an RNA that does not occur naturally. In other words, an artificial RNA may be understood as a non-natural RNA molecule. Such RNA molecules may be non-natural due to its individual sequence (e.g. G/C content modified coding sequence, UTRs) and/or due to other modifications, e.g. structural modifications of nucleotides. Typically, artificial RNA may be designed and/or generated by genetic engineering to correspond to a desired artificial sequence of nucleotides. In this context, an artificial RNA is a sequence that may not occur naturally, i.e. a sequence that differs from the wild type or reference sequence/the naturally occurring sequence by at least one nucleotide (via e.g. codon modification as further specified below). The term “artificial RNA” is not restricted to mean “one single molecule” but is understood to comprise an ensemble or plurality of essentially identical RNA molecules.

[0146] In some embodiments, the coding RNA is a modified and/or stabilized RNA.

[0147] According to some embodiments, the coding RNA may thus be provided as a “stabilized RNA” that is to say an RNA showing improved resistance to in vivo degradation and/or an RNA showing improved stability in vivo, and/or an RNA showing improved translatability in vivo. The term “stabilized RNA” refers to an RNA that is modified such that it is more stable to disintegration or degradation, e.g., by environmental factors or enzymatic digest, such as by exo- or endonuclease degradation, compared to an RNA without such modification. In one embodiment, a stabilized RNA in the context of the present disclosure is stabilized in a cell, such as a prokaryotic or eukaryotic cell, such as in a mammalian cell, such as a human cell. The stabilization effect may also be exerted outside of cells, e.g. in a buffer solution etc., e.g., for storage of a composition comprising the stabilized RNA.

[0148] The coding RNA of the present disclosure may be provided as a “stabilized RNA”.

[0149] In the following, suitable modifications/adaptations are described that are capable of “stabilizing” the RNA.

[0150] In some embodiments, the coding RNA comprises at least one codon modified coding sequence.

[0151] In some embodiments, the at least one coding sequence of the coding RNA is a codon modified coding sequence. Suitably, the amino acid sequence encoded by the at least one codon modified coding sequence is not being modified compared to the amino acid sequence encoded by the corresponding wild type or reference coding sequence.

[0152] The term “codon modified coding sequence” relates to coding sequences that differ in at least one codon (triplets of nucleotides coding for one amino acid) compared to the corresponding wild type or reference coding sequence. Suitably, a codon modified coding sequence in the context of the disclosure may show improved resistance to in vivo degradation and/or improved stability in vivo, and/or improved translatability in vivo. Codon modifications in the broadest sense make use of the degeneracy of the genetic code wherein multiple codons may encode the same amino acid and may be used interchangeably to optimize/modify the coding sequence for in vivo applications.

[0153] In some embodiments, the coding sequence of the coding RNA is a codon modified coding sequence, wherein the codon modified coding sequence is selected from C maximized coding sequence, CAI maximized coding sequence, human codon usage adapted coding sequence, G/C content modified coding sequence, and G/C optimized coding sequence, or any combination thereof.

[0154] In some embodiments, the coding sequence of the coding RNA has a G/C content of at least about 50%, 55%, or 60%. In particular embodiments, the at least one coding sequence of the RNA has a G/C content of at least about 50%, 51%, 52%, 53%, 54%, 55%, 56%, 57%, 58%, 59%, 60%, 61%, 62%, 63%, 64%, 65%, 66%, 67%, 68%, 69%, 70%, 71% or 72%.

[0155] When transfected into mammalian host cells, the coding RNA comprising the codon modified coding sequence has a stability of between 12-18 hours, or greater than 18 hours, e.g., 24, 36, 48, 60, 72, or greater than 72 hours and is capable of being expressed by the mammalian host cell (e.g. a muscle cell). RNA detection methods are known in the art.

[0156] When transfected into mammalian host cells, the coding RNA comprising the codon modified coding sequence is translated into protein, wherein the amount of protein is at least comparable to, or for example at least 10% more than, or at least 20% more than, or at least 30% more than, or at least 40% more than, or at least 50% more than, or at least 100% more than, or at least 200% or more than the amount of protein obtained by a naturally occurring or wild type or reference coding sequence transfected into mammalian host cells.

[0157] In some embodiments, the coding RNA may be modified, wherein the C content of the at least one coding sequence may be increased, for example maximized, compared to the C content of the corresponding wild type or reference coding sequence (herein referred to as “C maximized coding sequence”). The generation of a C maximized nucleic acid sequences may suitably be carried out using a modification method according to WO2015062738. In this context, the disclosure of WO2015062738 is included herewith by reference.

[0158] In some embodiments, the coding RNA may be modified, wherein the G/C content of the at least one coding sequence may be optimized compared to the G/C content of the corresponding wild type or reference coding sequence (herein referred to as “G/C optimized coding sequence”). “Optimized” in that context refers to a coding sequence wherein the G/C content is for example increased to the essentially highest possible G/C content. The generation of a G/C content optimized nucleic acid sequence may be carried out using a method according to WO2002098443. In this context, the disclosure of WO2002098443 is included in its full scope in the present disclosure. G/C optimized coding sequences are indicated by the abbreviations “opt1” or “gc”.

[0159] In some embodiments, the coding RNA may be modified, wherein the codons in the at least one coding sequence may be adapted to human codon usage (herein referred to as “human codon usage adapted coding sequence”). Codons encoding the same amino acid occur at different frequencies in humans. Accordingly, the coding sequence of the RNA is modified such that the frequency of the codons encoding the same amino acid corresponds to the naturally occurring frequency of that codon according to the human codon usage. For example, in the case of the amino acid Ala, the wild type or reference coding sequence is for example adapted in a way that the codon “GCC” is used with a frequency of 0.40, the codon “GCT” is used with a frequency of 0.28, the codon “GCA” is used with a frequency of 0.22 and the codon “GCG” is used with a frequency of 0.10 etc. (see e.g. Table 2 of published PCT patent application WO2021156267, which is incorporated by reference herein). Accordingly, such a procedure (as exemplified for Alanine) is applied for each amino acid encoded by the coding sequence of the RNA to obtain sequences adapted to human codon usage. Human codon usage adapted coding sequences are indicated by the abbreviation “opt3” or “human”.

[0160] In some embodiments, the coding RNA may be modified, wherein the G/C content of the at least one coding sequence may be modified compared to the G/C content of the corresponding wild type or reference coding sequence (herein referred to as “G/C modified coding sequence”). In this context, the terms “G/C optimization” or “G/C content modification” relate to a nucleic acid that comprises a modified, for example an increased number of guanosine and/or cytosine nucleotides as compared to the corresponding wild type or reference coding sequence. Such an increased number may be generated by substitution of codons containing adenosine or thymidine nucleotides by codons containing guanosine or cytosine nucleotides. Advantageously, RNA sequences having an increased G/C content are more stable or show a better expression than sequences having an increased A/U. For example, the G/C content of the coding sequence of the RNA is increased by at least 10%, 20%, 30%, for example by at least 40% compared to the G/C content of the coding sequence of the corresponding wild type or reference nucleic acid sequence (herein referred to “opt5” or “gc mod”).

[0161] In some embodiments, the coding RNA may be modified, wherein the codon adaptation index (CAI) may be increased or for example maximised in the at least one coding sequence (herein referred to as “CAI maximized coding sequence”). It is suitable that all codons of the wild type or reference nucleic acid sequence that are relatively rare in e.g. a human are exchanged for a respective codon that is frequent in the e.g. a human, wherein the frequent codon encodes the same amino acid as the relatively rare codon. Suitably, the most frequent codons are used for each amino acid of the encoded protein (see Table 2 of published PCT patent application WO2021156267, most frequent human codons are marked with asterisks). Suitably, the RNA comprises at least one coding sequence, wherein the codon adaptation index (CAI) of the at least one coding sequence is at least 0.5, at least 0.8, at least 0.9 or at least 0.95. For example, the codon adaptation index (CAI) of the at least one coding sequence is 1 (CAI=1). For example, in the case of the amino acid Ala, the wild type or reference coding sequence may be adapted in a way that the most frequent human codon “GCC” is always used for said amino acid. Accordingly, such a procedure (as exemplified for Alanine) may be applied for each amino acid encoded by the coding sequence of the nucleic acid to obtain CAI maximized coding sequences (herein referred to as “opt4” or “main”).

[0162] In some embodiments, the coding RNA of the first aspect comprises a coding sequence that comprises at least one of the nucleic acid sequences being identical or at least 70%, 80%, 85%, 86%, 87%, 88%, 89%, 90%, 91%, 92%, 93%, 94%, 95%, 96%, 97%, 98%, or 99% identical to the sequences according to any one of SEQ ID NOs: 197-246, 267-316, 523-545, 548-570, 573-595, 598-620, 623-645, 648-670, or a fragment or variant thereof.

[0163] In some embodiments, the coding RNA of the first aspect comprises a coding sequence that comprises at least one of the nucleic acid sequences being identical or at least 90%, 91%, 92%, 93%, 94%, 95%, 96%, 97%, 98%, or 99% identical to the sequences according to any one of SEQ ID NOs: 523-545, 548-570, 573-595, 598-620, 623-645, 648-670, or a fragment or variant thereof.

[0164] In some embodiments, the at least one coding sequence of the RNA of the disclosure is G/C optimized coding sequence.

[0165] In some embodiments, the coding RNA of the first aspect comprises a coding sequence that comprises at least one of the nucleic acid sequences being identical or at least 70%, 80%, 85%, 86%, 87%, 88%, 89%, 90%, 91%, 92%, 93%, 94%, 95%, 96%, 97%, 98%, or 99% identical to the sequences according to any one of SEQ ID NOs: 197-206, 207-216, 237-246, 267-276, 277-286, 307-316, 523-545, 548-570, 648-670, or a fragment or variant thereof.

[0166] In some embodiments, the coding RNA of the first aspect comprises a coding sequence that comprises at least one of the nucleic acid sequences being identical or at least 90%, 91%, 92%, 93%, 94%, 95%, 96%, 97%, 98%, or 99% identical to the sequences according to any one of SEQ ID NOs: 523-545, 548-570, 648-670, or a fragment or variant thereof.

[0167] In some embodiments, the coding RNA of the first aspect comprises a coding sequence that comprises at least one of the nucleic acid sequences being identical or at least 70%, 80%, 85%, 86%, 87%, 88%, 89%, 90%, 91%, 92%, 93%, 94%, 95%, 96%, 97%, 98%, or 99% identical to the sequences according to any one of SEQ ID NOs: 529, 533, 534, 554, 558, 559, 654, 658, 659, or a fragment or variant of any of these sequences.

[0168] In some embodiments, the coding sequence comprises more than one stop codon to allow sufficient termination of translation. In particularly embodiments, the coding sequence comprises two or three stop codon to allow sufficient termination of translation. These more than one stop codons may optionally be positioned in alternative reading frames.

### UTRs:

[0169] The RNA of the first aspect comprises at least one untranslated region (UTR).

[0170] The term “untranslated region” or “UTR” or “UTR element” will be recognized and understood by the person of ordinary skill in the art, and are e.g. intended to refer to a part of a nucleic acid molecule typically located 5′ or 3′ of a coding sequence. An UTR is not translated into protein. An UTR may be part of the RNA. An UTR may comprise elements for controlling gene expression, also called regulatory elements. Such regulatory elements may be, e.g., ribosomal binding sites, miRNA binding sites, promotor elements etc.

[0171] In some embodiments, the coding RNA comprises a protein-coding region (“coding sequence” or “cds”), and a 5′-UTR and/or 3′-UTR. Notably, UTRs may harbour regulatory sequence elements that determine RNA turnover, stability, and localization. Moreover, UTRs may harbour sequence elements that enhance translation. In medical applications, translation of the RNA into at least one peptide or protein is of paramount importance to therapeutic efficacy. Certain combinations of 3′-UTRs and/or 5′-UTRs may enhance the expression of operably linked coding sequences encoding peptides or proteins as defined herein. RNA molecules harbouring said UTR combinations advantageously enable rapid and transient expression of antigenic peptides or proteins after administration to a subject, for example after intramuscular administration. Accordingly, the RNA of the disclosure comprising certain combinations of 3′-UTRs and/or 5′-UTRs is particularly suitable for administration as a vaccine, in particular, suitable for administration into the muscle, the dermis, or the epidermis of a subject.

[0172] Suitably, the coding RNA comprises at least one 5′-UTR and/or at least one 3′-UTR. Said heterologous 5′-UTRs or 3′-UTRs may be derived from naturally occurring genes or may be synthetically engineered. In some embodiments, the RNA comprises at least one coding sequence as defined herein operably linked to at least one (heterologous) 3′-UTR and/or at least one (heterologous) 5′-UTR.

[0173] In some embodiments, the coding RNA of the disclosure comprises at least one 3′-UTR.

[0174] The term “3′-untranslated region” or “3′-UTR” will be recognized and understood by the person of ordinary skill in the art, and are e.g. intended to refer to a part of an RNA molecule located 3′ (i.e. downstream) of a coding sequence and which is not translated into protein. A 3′-UTR may be part of a nucleic acid located between a coding sequence and an (optional) terminal poly(A) sequence. A 3′-UTR may comprise elements for controlling gene expression, also called regulatory elements. Such regulatory elements may be, e.g., ribosomal binding sites, miRNA binding sites etc.

[0175] Optionally, the coding RNA comprises at least one 3′-UTR, which may be derivable from a gene that relates to an RNA with enhanced half-life (i.e. that provides a stable RNA).

[0176] In some embodiments, the 3′-UTR comprises one or more of a polyadenylation signal, a binding site for proteins that affect a nucleic acid stability of location in a cell, or one or more miRNA or binding sites for miRNAs.

[0177] MicroRNAs (or miRNA) are about 19-25 nucleotide long noncoding RNAs that bind to the 3′-UTR of RNA molecules and down-regulate gene expression either by reducing RNA stability or by inhibiting translation. E.g., microRNAs are known to regulate RNA, and thereby protein expression, e.g. in liver (miR-122), heart (miR-Id, miR-149), endothelial cells (miR-17-92, miR-126), adipose tissue (let-7, miR-30c), kidney (miR-192, miR-194, miR-204), myeloid cells (miR-142-3p, miR-142-5p, miR-16, miR-21, miR-223, miR-24, miR-27), muscle (miR-133, miR-206, miR-208), and lung epithelial cells (let-7, miR-133, miR-126). The RNA may comprise one or more microRNA target sequences, microRNA sequences, or microRNA seeds. Such sequences may correspond to any known microRNA, e.g. to those taught in US20050261218 and US20050059005, which are incorporated by reference herein.

[0178] Accordingly, miRNA, or binding sites for miRNAs as defined above may be removed from the 3′-UTR or may be introduced into the 3′-UTR in order to tailor the expression of the RNA to desired cell types or tissues (e.g. muscle cells).

[0179] In some embodiments, the coding RNA comprises at least one 3′-UTR, wherein the at least one 3′-UTR comprises a nucleic acid sequence derived or selected from a 3′-UTR of a gene selected from PSMB3, alpha-globin, ALB7, CASP1, COX6B1, FIG. 4, GNAS, NDUFA1 and RPS9, or from a homolog, a fragment, or variant of any one of these genes.

[0180] In some embodiments, the at least one 3′-UTR derived or selected from PSMB3, alpha-globin, ALB7, CASP1, COX6B1, FIG. 4, GNAS, NDUFA1 or RPS9 comprises or consist of a nucleic acid sequence being identical or at least 70%, 80%, 85%, 86%, 87%, 88%, 89%, 90%, 91%, 92%, 93%, 94%, 95%, 96%, 97%, 98%, or 99% identical to any one of SEQ ID NOs: 67-90, 109-120, or a fragment or a variant of any of these.

[0181] In one embodiment, the coding RNA comprises a 3′-UTR derived or selected from a PSMB3 gene.

[0182] In one embodiment, the 3′-UTR derived or selected from PSMB3 comprises or consist of a nucleic acid sequence being identical or at least 70%, 80%, 85%, 86%, 87%, 88%, 89%, 90%, 91%, 92%, 93%, 94%, 95%, 96%, 97%, 98%, or 99% identical to any one of SEQ ID NOs: 67, 68, 109-120, or a fragment or a variant thereof.

[0183] In other embodiments, the coding RNA comprises a 3′-UTR which comprises or consists of a nucleic acid sequence being identical or at least 70%, 80%, 85%, 86%, 87%, 88%, 89%, 90%, 91%, 92%, 93%, 94%, 95%, 96%, 97%, 98%, or 99% identical to SEQ ID NOs: 91-108 or a fragment or a variant thereof.

[0184] In other embodiments, the coding RNA comprises a 3′-UTR as described in WO2016107877, the disclosure of WO2016107877 relating to 3′-UTR sequences herewith incorporated by reference. Suitable 3′-UTRs are SEQ ID NOs: 1-24 and SEQ ID NOs: 49-318 of WO2016107877, or fragments or variants of these sequences. In other embodiments, the RNA comprises a 3′-UTR as described in WO2017036580, the disclosure of WO2017036580 relating to 3′-UTR sequences herewith incorporated by reference. Suitable 3′-UTRs are SEQ ID NOs: 152-204 of WO2017036580, or fragments or variants of these sequences. In other embodiments, the RNA comprises a 3′-UTR as described in WO2016022914, the disclosure of WO2016022914 relating to 3′-UTR sequences herewith incorporated by reference. Particularly suitable 3′-UTRs are nucleic acid sequences according to SEQ ID NOs: 20-36 of WO2016022914, or fragments or variants of these sequences.

[0185] In some embodiments, the coding RNA of the disclosure comprises at least one 5′-UTR.

[0186] The terms “5′-untranslated region” or “5′-UTR” will be recognized and understood by the person of ordinary skill in the art, and are e.g. intended to refer to a part of an RNA located 5′ (i.e. “upstream”) of a coding sequence and which is not translated into protein. A 5′-UTR may be part of a nucleic acid located 5′ of the coding sequence. Typically, a 5′-UTR starts with the transcriptional start site and ends before the start codon of the coding sequence. A 5′-UTR may comprise elements for controlling gene expression, also called regulatory elements. Such regulatory elements may be, e.g., ribosomal binding sites, miRNA binding sites etc. The 5′-UTR may be modified, e.g. by enzymatic or co-transcriptional addition of a 5′-cap structure (e.g. for mRNA as defined below).

[0187] Optionally, the coding RNA comprises at least one 5′-UTR, which may be derivable from a gene that relates to an RNA with enhanced half-life (i.e. that provides a stable RNA).

[0188] In some embodiments, the 5′-UTR comprises one or more of a binding site for proteins that affect an RNA stability or RNA location in a cell, or one or more miRNA or binding sites for miRNAs (as defined above).

[0189] Accordingly, miRNA or binding sites for miRNAs as defined above may be removed from the 5′-UTR or introduced into the 5′-UTR in order to tailor the expression of the nucleic acid to desired cell types or tissues (e.g. muscle cells).

[0190] In some embodiments, the coding RNA comprises at least one 5′-UTR, wherein the at least one 5′-UTR comprises a nucleic acid sequence derived or selected from a 5′-UTR of gene selected from HSD17B4, RPL32, ASAH1, ATP5A1, MP68, NDUFA4, NOSIP, RPL31, SLC7A3, TUBB4B, and UBQLN2, or from a homolog, a fragment or variant of any one of these genes.

[0191] In some embodiments, the at least one 5′-UTR derived or selected from HSD17B4, RPL32, ASAH1, ATP5A1, MP68, NDUFA4, NOSIP, RPL31, SLC7A3, TUBB4B, and UBQLN2 comprises or consist of a nucleic acid sequence being identical or at least 70%, 80%, 85%, 86%, 87%, 88%, 89%, 90%, 91%, 92%, 93%, 94%, 95%, 96%, 97%, 98%, or 99% identical to any one of SEQ ID NOs: 1-32, 65, 66, or a fragment or a variant of any of these.

[0192] In one embodiment, the coding RNA comprises a 5′-UTR derived or selected from a HSD17B4 gene.

[0193] In one embodiment, the 5′-UTR derived or selected from HSD17B4 comprises or consists of a nucleic acid sequence being identical or at least 70%, 80%, 85%, 86%, 87%, 88%, 89%, 90%, 91%, 92%, 93%, 94%, 95%, 96%, 97%, 98%, or 99% identical to any one of SEQ ID NOs: 1, 2, 65, 66, or a fragment or a variant thereof.

[0194] In other embodiments, the coding RNA comprises a 5′-UTR which comprises or consists of a nucleic acid sequence being identical or at least 70%, 80%, 85%, 86%, 87%, 88%, 89%, 90%, 91%, 92%, 93%, 94%, 95%, 96%, 97%, 98%, or 99% identical to SEQ ID NOs: 33-64 or a fragment or a variant thereof.

[0195] In other embodiments, the coding RNA comprises a 5′-UTR as described in WO2013143700, the disclosure of WO2013143700 relating to 5′-UTR sequences herewith incorporated by reference. Particularly suitable 5′-UTRs are nucleic acid sequences derived from SEQ ID NOs: 1-1363, SEQ ID NO: 1395, SEQ ID NO: 1421 and SEQ ID NO: 1422 of WO2013143700, or fragments or variants of these sequences. In other embodiments, the coding RNA comprises a 5′-UTR as described in WO2016107877, the disclosure of WO2016107877 relating to 5′-UTR sequences herewith incorporated by reference. Particularly suitable 5′-UTRs are nucleic acid sequences according to SEQ ID NOs: 25-30 and SEQ ID NOs: 319-382 of WO2016107877, or fragments or variants of these sequences. In other embodiments, the RNA comprises a 5′-UTR as described in WO2017036580, the disclosure of WO2017036580 relating to 5′-UTR sequences herewith incorporated by reference. Particularly suitable 5′-UTRs are nucleic acid sequences according to SEQ ID NOs: 1-151 of WO2017036580, or fragments or variants of these sequences. In other embodiments, the RNA comprises a 5′-UTR as described in WO2016022914, the disclosure of WO2016022914 relating to 5′-UTR sequences herewith incorporated by reference. Suitable 5′-UTRs are nucleic acid sequences according to SEQ ID NOs: 3-19 of WO2016022914, whose disclosure is incorporated by reference herein, or fragments or variants of these sequences.

[0196] In some embodiments, the coding RNA of the disclosure comprises a coding sequence as specified herein encoding an antigenic polypeptide which is selected or derived from Escherichia coli FimH, and a 3′-UTR and/or a 5′-UTR selected from the following 5′-UTR/3′-UTR combinations (also referred to “UTR designs”): a-1 (HSD17B4/PSMB3), a-2 (NDUFA4/PSMB3), a-3 (SLC7A3/PSMB3), a-4 (NOSIP/PSMB3), a-5 (MP68/PSMB3), b-1 (UBQLN2/RPS9), b-2 (ASAH1/RPS9), b-3 (HSD17B4/RPS9), b-4 (HSD17B4/CASP1), b-5 (NOSIP/COX6B1), c-1 (NDUFA4/RPS9), c-2 (NOSIP/NDUFA1), c-3 (NDUFA4/COX6B1), c-4 (NDUFA4/NDUFA1), c-5 (ATP5A1/PSMB3), d-1 (Rpl31/PSMB3), d-2 (ATP5A1/CASP1), d-3 (SLC7A3/GNAS), d-4 (HSD17B4/NDUFA1), d-5 (Slc7a3/Ndufa1), e-1 (TUBB4B/RPS9), e-2 (RPL31/RPS9), e-3 (MP68/RPS9), e-4 (NOSIP/RPS9), e-5 (ATP5A1/RPS9), e-6 (ATP5A1/COX6B1), f-1 (ATP5A1/GNAS), f-2 (ATP5A1/NDUFA1), f-3 (HSD17B4/COX6B1), f-4 (HSD17B4/GNAS), f-5 (MP68/COX6B1), g-1 (MP68/NDUFA1), g-2 (NDUFA4/CASP1), g-3 (NDUFA4/GNAS), g-4 (NOSIP/CASP1), g-5 (RPL31/CASP1), h-1 (RPL31/COX6B1), h-2 (RPL31/GNAS), h-3 (RPL31/NDUFA1), h-4 (Slc7a3/CASP1), h-5 (SLC7A3/COX6B1), i-1 (SLC7A3/RPS9), i-2 (RPL32/ALB7), i-2 (RPL32/ALB7), or i-3 (alpha-globin gene).

[0197] In some embodiments, the coding RNA comprises a coding sequence as defined herein encoding an antigenic polypeptide which is selected or derived from Escherichia coli FimH, and a HSD17B4 5′-UTR and a PSMB3 3′-UTR (HSD17B4/PSMB3 (a-1)). It has been shown by the inventors that this embodiment is particularly beneficial for induction of an immune response against Escherichia coli FimH.

[0198] In various embodiments, the coding RNA of the disclosure is monocistronic, bicistronic, or multicistronic.

[0199] In some embodiments, the coding RNA of the disclosure is monocistronic.

[0200] The term “monocistronic” will be recognized and understood by the person of ordinary skill in the art, and is e.g. intended to refer to an RNA that comprises only one coding sequence. The terms “bicistronic”, or “multicistronic” as used herein are e.g. intended to refer to an RNA that comprises two (bicistronic) or more (multicistronic) coding sequences.

[0201] In some embodiments, the A/U (A/T) content in the environment of the ribosome binding site of the RNA is increased compared to the A/U (A/T) content in the environment of the ribosome binding site of its respective wild type or reference nucleic acid. This modification increases the efficiency of ribosome binding to the RNA, which is in turn beneficial for an efficient translation of the RNA into antigenic peptides or proteins.

[0202] Accordingly, in one embodiment, the coding RNA comprises a ribosome binding site, also referred to as “Kozak sequence” identical to or at least 80%, 85%, 90%, 95% identical to any one of SEQ ID NOs: 128-135, or fragments or variants of any of these.

### Poly(N)Sequences, Histone Stem Loops:

[0203] In some embodiments, the coding RNA comprises at least one poly(N) sequence, e.g. at least one poly(A) sequence, at least one poly(U) sequence, at least one poly(C) sequence, or combinations thereof.

[0204] In some embodiments, the coding RNA of the disclosure comprises at least one poly(A) sequence.

[0205] The terms “poly(A) sequence”, “poly(A) tail” or “3′-poly(A) tail” as used herein will be recognized and understood by the person of ordinary skill in the art, and are e.g. intended to be a sequence of adenosine nucleotides, typically located at the 3′-end of a linear RNA of up to about 1000 adenosine nucleotides. For example, said poly(A) sequence is essentially homopolymeric, e.g. a poly(A) sequence of e.g. 100 adenosine nucleotides has essentially the length of 100 nucleotides. In other embodiments, the poly(A) sequence is interrupted by at least one nucleotide different from an adenosine nucleotide, e.g. a poly(A) sequence of e.g. 100 adenosine nucleotides may have a length of more than 100 nucleotides (comprising 100 adenosine nucleotides and in addition said at least one nucleotide—or a stretch of nucleotides—different from an adenosine nucleotide).

[0206] In some embodiments, the at least one poly(A) sequence may comprise about 40 to about 500 adenosine nucleotides, about 40 to about 200 adenosine nucleotides, about 40 to about 150 adenosine nucleotides, for example about 60 to about 150 adenosine nucleotides.

[0207] In some embodiment, the at least one poly(A) sequence may comprise about 40 to about 500 consecutive adenosine nucleotides, about 40 to about 200 consecutive adenosine nucleotides, about 40 to about 150 consecutive adenosine nucleotides, for example about 60 to about 150 consecutive adenosine nucleotides.

[0208] Suitably, the length of the poly(A) sequence may be at least about or even more than about 10, 50, 64, 75, 100, 200, 300, 400, or 500 adenosine nucleotides, for example consecutive adenosine nucleotides.

[0209] In some embodiments, the at least one poly(A) sequence comprises about 100 adenosine nucleotides (A100), for example about 100 consecutive adenosine nucleotides.

[0210] In further embodiments, the RNA comprises at least one poly(A) sequence comprising about 100 adenosine nucleotides, wherein the poly(A) sequence is interrupted by non-adenosine nucleotides, for example by about 10 non-adenosine nucleotides (A30-N10-A70).

[0211] Suitably, the poly(A) sequence as defined herein may be located directly at the 3′ terminus of the RNA. In some embodiments, the 3′-terminal nucleotide (that is the last 3′-terminal nucleotide in the polynucleotide chain) is the 3′-terminal A nucleotide of the at least one poly(A) sequence. The term “directly located at the 3′ terminus” has to be understood as being located exactly at the 3′ terminus—in other words, the 3′ terminus of the RNA consists of a poly(A) sequence terminating with an A.

[0212] Ending on an adenosine nucleotide may decrease the induction of interferons, e.g. IFNalpha, by the RNA of the disclosure if for example administered as a vaccine. This is particularly important as the induction of interferons, e.g. IFNalpha, is thought to be one main factor for induction of fever in vaccinated subjects.

[0213] Accordingly, in some embodiments, the coding RNA of the disclosure comprises a poly(A) sequence of about 100 consecutive adenosine nucleotides, wherein said poly(A) sequence is located directly at the 3′ terminus of the RNA, optionally wherein the 3′ terminal nucleotide is an adenosine.

[0214] In some embodiments, the poly(A) sequence of the RNA is obtained from a DNA template during RNA in vitro transcription. In other embodiments, the poly(A) sequence is obtained in vitro by common methods of chemical synthesis without being necessarily transcribed from a DNA template. In other embodiments, poly(A) sequences are generated by enzymatic polyadenylation of the RNA (after RNA in vitro transcription) using e.g. immobilized poly(A)polymerases according to methods and means as described in WO2016174271, which is incorporated by reference herein.

[0215] In some embodiments, the coding RNA comprises at least one poly(A) sequence obtained by enzymatic polyadenylation, wherein the majority of RNA molecules comprise about 100 (+/−20) to about 500 (+/−100) adenosine nucleotides, for example about 100 (+/−20) to about 200 (+/−40) adenosine nucleotides.

[0216] In some embodiments, the coding RNA comprises at least one poly(A) sequence derived from a template DNA and additionally at least one poly(A) sequence generated by enzymatic polyadenylation, e.g. as described in published PCT patent application WO2016091391, which is incorporated by reference herein.

[0217] In some embodiments, the coding RNA comprises at least one polyadenylation signal.

[0218] In some embodiments, the coding RNA comprises at least one poly(C) sequence. A poly(C) sequence in the context of the disclosure may be located in an UTR region, for example in the 3′-UTR.

[0219] The term “poly(C) sequence” as used herein is intended to be a sequence of cytosine nucleotides of up to about 200 cytosine nucleotides. In some embodiments, the poly(C) sequence comprises about 10 to about 200 cytosine nucleotides, about 10 to about 100 cytosine nucleotides, about 20 to about 70 cytosine nucleotides, about 20 to about 60 cytosine nucleotides, or about 10 to about 40 cytosine nucleotides. In one embodiment, the poly(C) sequence comprises about 30 cytosine nucleotides.

[0220] In some embodiment, the coding RNA of the disclosure comprises at least one poly(C) sequence and/or at least one miRNA binding site and/or histone stem-loop sequence.

[0221] In some embodiments, the coding RNA of the disclosure comprises at least one histone stem-loop (hSL) or histone stem-loop structure. A hSL in the context of the disclosure may be located in an UTR region, for example in the 3′-UTR.

[0222] The term “histone stem-loop” (hSL) is intended to refer to nucleic acid sequences that forms a stem-loop secondary structure predominantly found in histone mRNAs.

[0223] Histone stem-loop sequences/structures may suitably be selected from hSL sequences as disclosed in WO2012019780, the disclosure relating to histone stem-loop sequences/histone stem-loop structures incorporated herewith by reference. A hSL sequence that may be used within the present disclosure may be derived from formulae (I) or (II) of WO2012019780. According to one embodiment, the RNA comprises at least one hSL sequence derived from at least one of the specific formulae (Ia) or (IIa) of WO2012019780.

[0224] In some embodiments, the coding RNA comprises at least one hSL, wherein said hSL comprises or consists of an RNA sequence identical or at least 70%, 80%, 90%, 91%, 92%, 93%, 94%, 95%, 96%, 97%, 98%, or 99% identical to any one of SEQ ID NOs: 136, 137, or fragments or of those.

[0225] In alternative embodiments, the coding RNA does not comprise a histone stem-loop as defined herein.

[0226] In some embodiments, the coding RNA comprises a 3′-terminal sequence element. The 3′-terminal sequence element represents the 3′ terminus of the RNA. A 3′-terminal sequence element may comprise at least one poly(N) sequence as defined herein and, optionally, at least one hSL as defined herein.

[0227] In some embodiments, the coding RNA comprises at least one 3′-terminal sequence element comprising or consisting of an RNA sequence being identical or at least 70%, 80%, 90%, 91%, 92%, 93%, 94%, 95%, 96%, 97%, 98%, or 99% identical to any one of SEQ ID NOs: 138-172, or a fragment or variant of these sequences.

[0228] In some embodiments, the coding RNA comprises a 3′-terminal sequence element comprising a hSL as defined herein followed by a poly(A) sequence comprising about 100 consecutive adenosines.

[0229] In some embodiments, the coding RNA comprises a 3′-terminal sequence element comprising or consisting of an RNA sequence being identical or at least 70%, 80%, 90%, 91%, 92%, 93%, 94%, 95%, 96%, 97%, 98%, or 99% identical to SEQ ID NOs: 144, or a fragment or variant thereof.

[0230] In some embodiments, the coding RNA comprises a 5′-terminal sequence element comprising or consisting of an RNA sequence being identical or at least 70%, 80%, 90%, 91%, 92%, 93%, 94%, 95%, 96%, 97%, 98%, or 99% identical to any one of SEQ ID NOs: 121-127, or a fragment or variant of these sequences.

[0231] In some embodiments, the coding RNA comprises a 5′-terminal sequence element comprising or consisting of an RNA sequence being identical or at least 70%, 80%, 90%, 91%, 92%, 93%, 94%, 95%, 96%, 97%, 98%, or 99% identical to SEQ ID NOs: 122, or a fragment or variant thereof.

[0232] Such a 5′-terminal sequence element may comprise e.g. a binding site for T7 RNA polymerase. Further, the first nucleotide of said 5′-terminal start sequence may for example comprise a 2′O methylation, e.g. 2′O methylated guanosine or a 2′O methylated adenosine.

### Cap Structures:

[0233] Suitably, the coding RNA comprises a 5′-cap structure, which suitably stabilizes the RNA and/or enhances expression of the encoded antigen and/or reduces the stimulation of the innate immune system (after administration to a subject, e.g. a human subject).

[0234] Accordingly, in some embodiments, the coding RNA comprises a 5′-cap structure, such as m7G, cap0, cap1, cap2, a modified cap0 or a modified cap1 structure.

[0235] The term “5′-cap structure” as used herein will be recognized and understood by the person of ordinary skill in the art, and is e.g. intended to refer to a 5′ modified nucleotide, particularly a guanine nucleotide, positioned at the 5′-end of an RNA, e.g. an mRNA. For example, the 5′-cap structure is connected via a 5′-5′-triphosphate linkage to the RNA. 5′-cap structures which may be suitable in the context of the present disclosure are cap0 (methylation of the first nucleobase, e.g. m7GpppN), cap1 (additional methylation of the ribose of the adjacent nucleotide of m7GpppN), cap2 (additional methylation of the ribose of the 2nd nucleotide downstream of the m7GpppN), cap3 (additional methylation of the ribose of the 3rd nucleotide downstream of the m7GpppN), cap4 (additional methylation of the ribose of the 4th nucleotide downstream of the m7GpppN), ARCA (anti-reverse cap analogue), modified ARCA (e.g. phosphothioate modified ARCA), inosine, N1-methyl-guanosine, 2′-fluoro-guanosine, 7-deaza-guanosine, 8-oxo-guanosine, 2-amino-guanosine, LNA-guanosine, and 2-azido-guanosine.

[0236] A 5′-cap (cap0 or cap1) structure may be formed in chemical RNA synthesis or in RNA in vitro transcription (co-transcriptional capping) using cap analogues.

[0237] The term “cap analogue” as used herein will be recognized and understood by the person of ordinary skill in the art, and is e.g. intended to refer to a non-polymerizable di-nucleotide or tri-nucleotide that has cap functionality in that it facilitates translation or localization, and/or prevents degradation of an RNA molecule when incorporated at the 5′-end of the nucleic acid molecule. Non-polymerizable means that the cap analogue will be incorporated only at the 5′-terminus because it does not have a 5′ triphosphate and therefore cannot be extended in the 3′-direction by a template-dependent polymerase, particularly, by template-dependent RNA polymerase. Examples of cap analogues include, but are not limited to, a chemical structure selected from the group consisting of m7GpppG, m7GpppA, m7GpppC; unmethylated cap analogues (e.g. GpppG); dimethylated cap analogue (e.g. m2,7GpppG), trimethylated cap analogue (e.g. m2,2,7GpppG), dimethylated symmetrical cap analogues (e.g. m7Gpppm7G), or anti reverse cap analogues (e.g. ARCA; m7,2′OmeGpppG; m7,2′dGpppG; m7,3′OmeGpppG; m7,3′dGpppG and their tetraphosphate derivatives). Further suitable cap analogues are described in WO2008016473, WO2008157688, WO2009149253, WO2011015347, WO2013059475, WO2017066793, WO2017066781, WO2017066791, WO2017066789, WO2017053297, WO2017066782, WO2018075827 and WO2017066797, the disclosures referring to cap analogues herewith incorporated by reference.

[0238] In embodiments, a cap1 structure is generated using tri-nucleotide cap analogue as disclosed in WO2017053297, WO2017066793, WO2017066781, WO2017066791, WO2017066789, WO2017066782, WO2018075827 and WO2017066797. For example, cap structures derivable from the structure disclosed in claim 1-5 of WO2017053297 may be suitably used to co-transcriptionally generate a cap1 structure. Further, any cap structures derivable from the structure defined in claim 1 or claim 21 of WO2018075827 may be suitably used to generate a cap1 structure. These disclosures are herewith incorporated by reference.

[0239] In some embodiments, the 5′-cap structure may suitably be added co-transcriptionally using tri-nucleotide cap analogue as defined herein, in particular in an RNA in vitro transcription reaction as defined herein.

[0240] In some embodiments, the coding RNA of the disclosure, in particular the mRNA, comprises a cap1 structure.

[0241] In some embodiments, the cap1 structure of the RNA is formed via co-transcriptional capping using tri-nucleotide cap analogues m7G(5′)ppp(5′)(2′OMeA)pG or m7G(5′)ppp(5′)(2′OMeG)pG. A particularly suitable cap1 analogue in that context is m7G(5′)ppp(5′)(2′OMeA)pG.

[0242] In other embodiments, the cap1 structure of the RNA is formed using co-transcriptional capping using tri-nucleotide cap analogue 3′OMe-m7G(5′)ppp(5′)(2′OMeA)pG.

[0243] In alternative embodiments, the 5′-cap structure is formed via enzymatic capping using capping enzymes (e.g. vaccinia virus capping enzymes and/or cap-dependent 2′-O methyltransferases) to generate cap0 or cap1 or cap2 structures. In that context, the 5′-cap structure (cap0 or cap1) may be added using immobilized capping enzymes and/or cap-dependent 2′-O methyltransferases using methods and means disclosed in published PCT patent application WO2016193226, which is incorporated by reference herein.

[0244] In some embodiments, about 70%, 75%, 80%, 85%, 90%, 95% of the RNA (species) comprises a cap structure, for example a cap1 structure as determined by a capping assay.

[0245] For determining the presence or absence of a cap structure, a capping assay as described in published PCT application WO2015101416, in particular, as described in claims 27 to 46 of published PCT application WO2015101416 can be used. Other capping assays that may be used to determine the presence or absence of a cap structure of an RNA are described in published PCT application WO2020127959. These disclosures are herewith incorporated by reference.

### Modified Nucleotides:

[0246] According to various embodiments, the coding RNA of the disclosure is a modified RNA, wherein the modification refers to chemical modifications comprising backbone modifications as well as sugar modifications or base modifications.

[0247] A modified RNA may comprise nucleotide analogues/modifications, e.g. backbone modifications, sugar modifications or base modifications. A backbone modification in the context of the disclosure is a modification in which phosphates of the backbone of the nucleotides of the RNA are chemically modified. A sugar modification in the context of the disclosure is a chemical modification of the sugar of the nucleotides of the RNA. Furthermore, a base modification in the context of the disclosure is a chemical modification of the base moiety of the nucleotides of the RNA. In this context, nucleotide analogues or modifications are for example selected from nucleotide analogues which are applicable for transcription and/or translation.

[0248] Accordingly, in some embodiments, the coding RNA of the disclosure comprises at least one modified nucleotide.

[0249] In some embodiments, the at least one modified nucleotide is selected from pseudouridine, N1-methylpseudouridine, N1-ethylpseudouridine, 2-thiouridine, 4-thiouridine, 5-methylcytosine, 5-methyluridine, 2-thio-1-methyl-1-deaza-pseudouridine, 2-thio-1-methyl-pseudouridine, 2-thio-5-aza-uridine, 2-thio-dihydropseudouridine, 2-thio-dihydrouridine, 2-thio-pseudouridine, 4-methoxy-2-thio-pseudouridine, 4-methoxy-pseudouridine, 4-thio-1-methyl-pseudouridine, 4-thio-pseudouridine, 5-aza-uridine, dihydropseudouridine, 5-methoxyuridine and 2′-O-methyl uridine.

[0250] Suitable in that context are pseudouridine (ψ) and N1-methylpseudouridine (m1ψ). N1-methylpseudouridine (m1ψ) is particularly suitable.

[0251] In some embodiments, essentially all, e.g. essentially 100% of the uracil in the coding sequence (or the full RNA sequence) have a chemical modification, for example a chemical modification in the 5-position of the uracil.

[0252] Incorporating modified nucleotides such as e.g. pseudouridine (ψ) or N1-methylpseudouridine (m1ψ) into the coding sequence (or the full RNA sequence) may be advantageous as unwanted innate immune responses (upon administration of the RNA) may be adjusted or reduced (if required).

[0253] In alternative embodiments, the coding RNA of the disclosure does not comprise modified nucleotides such as N1-methylpseudouridine (m1ψ) substituted positions or pseudouridine (ψ) substituted positions.

[0254] In some embodiments in that context, the coding RNA of the disclosure comprises a coding sequence that consists only of G, C, A and U nucleotides and therefore does not comprise modified nucleotides.

### Further RNA Features:

[0255] In the context of the disclosure, the coding RNA provides a coding sequence encoding an antigenic polypeptide which is selected or derived from Escherichia coli FimH as defined herein that is translated into a (functional) antigen after administration (e.g. after administration to a subject, e.g. a human subject).

[0256] In the context of the disclosure, a coding RNA can be any type of RNA that comprises a coding sequence encoding an antigenic polypeptide which is selected or derived from Escherichia coli FimH. For example, the coding RNA can be any type of single stranded coding RNA, double stranded coding RNA, linear coding RNA, or circular coding RNA, or any combination thereof.

[0257] Optionally, the coding RNA comprises about 50 to about 20000 nucleotides, or about 500 to about 10000 nucleotides, or about 1000 to about 10000 nucleotides, or for example about 1000 to about 5000 nucleotides, or for example about 2000 to about 5000 nucleotides.

[0258] In some embodiments, the coding RNA is selected from an mRNA, a coding self-replicating RNA, a coding circular RNA, a coding viral RNA, or a coding replicon RNA.

[0259] In embodiments, the coding RNA is a circular RNA. As used herein, “circular RNA” or “circRNAs” have to be understood as an RNA construct that is connected to form a circle and therefore does not comprise a 3′ or 5′ terminus. In some embodiments, said circRNA comprises a coding sequence encoding an antigenic polypeptide which is selected or derived from Escherichia coli FimH as defined herein.

[0260] In some embodiments, the coding RNA is an mRNA.

[0261] Suitable features that the mRNA of the disclosure optionally comprises are for example a 5′-cap structure as defined herein, a 5′-UTR as defined herein, a 3′-UTR as defined herein, hSL as defined herein, Poly(A)sequence as defined herein, and optional chemical modifications as defined herein.

[0262] In some embodiments, the coding RNA is an in vitro transcribed RNA (e.g. an in vitro transcribed mRNA).

[0263] In some embodiments, the nucleotide mixture for RNA in vitro transcription comprises modified nucleotides as defined herein. In that context, suitable modified nucleotides may be selected from pseudouridine (ψ) or N1-methylpseudouridine (m1ψ). Suitably, uracil nucleotides in the nucleotide mixture are replaced (either partially or completely) by pseudouridine (ψ) and/or N1-methylpseudouridine (m1ψ) to obtain a modified RNA (e.g. a modified mRNA).

[0264] In some embodiments, the nucleotide mixture used in RNA in vitro transcription does not comprise modified nucleotides as defined herein. In some embodiments, the nucleotide mixture used for RNA in vitro transcription does only comprise guanosine (G), cytidine (C), adenosine (A) and uridine (U) nucleotides, and, optionally, a cap analogue as defined herein to obtain a non-modified RNA (e.g. a non-modified mRNA).

[0265] In some embodiments, the nucleotide mixture (i.e. the fraction of each nucleotide in the mixture) used for RNA in vitro transcription reactions is optimized for the given RNA sequence, for example as described WO2015188933, which is incorporated by reference herein.

[0266] In one embodiment, the coding RNA is lyophilized (e.g. according to WO2016165831 or WO2011069586) to yield a temperature stable dried RNA. The RNA may also be dried using spray-drying or spray-freeze drying (e.g. according to WO2016184575 or WO2016184576) to yield a temperature stable RNA (powder). These disclosures are incorporated by reference herein.

[0267] In the context of the disclosure (e.g. for RNA-based vaccines), it may be required to provide GMP-grade RNA. GMP-grade RNA is produced using a manufacturing process approved by regulatory authorities. In some embodiments, RNA production is performed under current good manufacturing practice (GMP), implementing various quality control steps on DNA and RNA level, for example quality control steps selected from methods described in WO2016180430. In some embodiments, the RNA of the disclosure is a GMP-grade RNA, for example a GMP-grade mRNA.

[0268] In some embodiments, the coding RNA of the disclosure is a purified RNA, optionally a purified mRNA.

[0269] The term “purified RNA” or “purified mRNA” as used herein has to be understood as RNA which has a higher purity after certain purification steps (e.g. HPLC, TFF, Oligo d(T) purification, precipitation steps) than the starting material (e.g. in vitro transcribed RNA). Typical impurities that are essentially not present in purified RNA comprise peptides or proteins (e.g. enzymes derived from DNA dependent RNA in vitro transcription, e.g. RNA polymerases, RNases, pyrophosphatase, restriction endonuclease, DNase), spermidine, BSA, abortive RNA sequences, RNA fragments (short double stranded RNA (dsRNA)), free nucleotides (modified nucleotides, conventional NTPs, cap analogue), template DNA fragments, buffer components (HEPES, TRIS, MgCl2) etc. Other potential impurities that may be derived from e.g. fermentation procedures comprise bacterial impurities (bioburden, bacterial DNA) or impurities derived from purification procedures (organic solvents etc.). Accordingly, it is desirable in this regard for the “degree of RNA purity” to be as close as possible to 100%. Accordingly, “purified RNA” as used herein has a degree of purity of more than 75%, 80%, 85%, very particularly 90%, 91%, 92%, 93%, 94%, 95%, 96%, 97%, 98% and most favourably 99% or more. The degree of purity is e.g. determined by an analytical HPLC, wherein the percentages provided above correspond to the ratio between the area of the peak for the target RNA and the total area of all peaks including the peaks representing the by-products. Alternatively, the degree of purity is e.g. determined by an analytical agarose gel electrophoresis or capillary gel electrophoresis.

[0270] Suitably, purification of the coding RNA of the disclosure may be performed by means of (RP)-HPLC, AEX, size exclusion chromatography, hydroxyapatite chromatography, TFF, filtration, precipitation, core-bead flow through chromatography, oligo(dT) purification, and/or cellulose-based purification.

[0271] Optionally, the RNA has been purified using RP-HPLC (for example as described in WO2008077592) and/or tangential flow filtration (for example as described in WO2016193206) and/or oligo d(T) purification (for example as described in WO2016180430) to e.g. to remove dsRNA, non-capped RNA and/or RNA fragments.

[0272] In embodiments, the coding RNA of the disclosure has a certain RNA integrity.

[0273] The term “RNA integrity” generally describes whether the complete RNA sequence is present. Low RNA integrity could be due to, amongst others, RNA degradation, RNA cleavage, incorrect or incomplete chemical synthesis of the RNA, incorrect base pairing, integration of modified nucleotides or the modification of already integrated nucleotides, lack of capping or incomplete capping, lack of polyadenylation or incomplete polyadenylation, or incomplete RNA in vitro transcription. RNA is a fragile molecule that can easily degrade, which may be caused e.g. by temperature, ribonucleases, pH or other factors (e.g. nucleophilic attacks, hydrolysis etc.), which may reduce the RNA integrity and, consequently, its functionality.

[0274] The skilled person can choose from a variety of different chromatographic or electrophoretic methods for determining integrity of RNA. Chromatographic and electrophoretic (e.g. capillary gel electrophoresis) methods are well-known in the art. In case chromatography is used (e.g. RP-HPLC), the analysis of the integrity of the RNA may be based on determining the peak area (or “area under the peak”) of the expected full length RNA (the RNA with the correct RNA length) in a corresponding chromatogram.

[0275] In embodiments, the coding RNA of the disclosure has an RNA integrity ranging from about 40% to about 100%. In embodiments, the RNA has an RNA integrity ranging from about 50% to about 100%. In embodiments, the RNA has an RNA integrity ranging from about 60% to about 100%. In embodiments, the RNA has an RNA integrity ranging from about 70% to about 100%. In embodiments, the RNA integrity is for example about 50%, about 60%, about 70%, about 80%, or about 90%. RNA is suitably determined using analytical HPLC, for example analytical RP-HPLC.

[0276] In some embodiments, the coding RNA has an RNA integrity of at least about 50%, for example of at least about 60%, for example of at least about 70%, for example of at least about 80% or about 90%. RNA integrity is suitably determined using analytical HPLC, for example analytical RP-HPLC.

[0277] In some embodiments, the coding RNA is suitable for intranasal, oral, sublingual, intravenous, intramuscular, intradermal, transdermal, or subcutaneous administration. In some embodiments, the coding RNA is suitable for intramuscular administration.

### RNA Constructs:

[0278] In some embodiments, the coding RNA comprises at least the following elements, for example in 5′ to 3′ direction:
[0279] A) a 5′-cap structure, for example as specified herein;
[0280] B) at least one cds encoding an antigenic polypeptide which is selected or derived from Escherichia coli FimH as defined herein;
[0281] C) a 5′-UTR and/or a 3′-UTR, for example as specified herein;
[0282] D) at least one poly(A) sequence, for example as specified herein.

[0283] In various embodiments, the coding RNA, for example the mRNA, comprises the following elements, for example in 5′ to 3′ direction:
[0284] A) a 5′-cap structure, for example as specified herein;
[0285] B) a 5′-terminal start element, for example as specified herein;
[0286] C) optionally, a 5′-UTR, for example as specified herein;
[0287] D) a ribosome binding site, for example as specified herein;
[0288] E) at least one cds encoding an antigenic polypeptide which is selected or derived from Escherichia coli FimH as defined herein;
[0289] F) a 3′-UTR, for example as specified herein;
[0290] G) optionally, at least one poly(A) sequence, for example as specified herein;
[0291] H) optionally, at least one poly(C) sequence, for example as specified herein;
[0292] I) optionally, histone stem-loop for example as specified herein;
[0293] J) optionally, 3′-terminal sequence element, for example as specified herein;
[0294] K) optionally, chemically modified nucleotides, for example as specified herein.

[0295] In various embodiments, the coding RNA, for example the mRNA, comprises the following elements, for example in 5′ to 3′ direction:
[0296] A) a 5′-cap structure;
[0297] B) a 5′-UTR for example selected or derived from a 5′-UTR of a HSD17B4 gene;
[0298] C) at least one coding sequence encoding an antigenic polypeptide which is selected or derived from Escherichia coli FimH as defined herein;
[0299] D) a 3′-UTR for example selected or derived from a 3′-UTR of a PSMB3 gene;
[0300] E) optionally, a histone stem-loop; and
[0301] F) a poly(A) sequence for example comprising about 100 A nucleotides.

[0302] In some embodiments, the mRNA comprises the following elements for example in 5′- to 3′-direction:
[0303] A) a cap1 structure for example as defined herein;
[0304] B) a 5′-UTR derived from a HSD17B4 gene as defined herein;
[0305] C) at least one cds encoding an antigenic polypeptide which is selected or derived from Escherichia coli FimH as defined herein, for example wherein the coding sequence that comprises at least one of the nucleic acid sequences being identical or at least 70%, 80%, 85%, 86%, 87%, 88%, 89%, 90%, 91%, 92%, 93%, 94%, 95%, 96%, 97%, 98%, or 99% identical to the sequences according to any one of SEQ ID NOs: 187-246, 257-316, 523-545, 548-570, 573-595, 598-620, 623-645, 648-670, or a fragment or a fragment or variant thereof;
[0306] D) a 3′-UTR derived from a 3′-UTR of a PSMB3 gene as defined herein;
[0307] E) optionally, a histone stem-loop as defined herein;
[0308] F) a poly(A) sequence for example comprising about 100 A nucleotides;
[0309] G) optionally, chemically modified nucleotides, e.g. pseudouridine (ψ) or N1-methylpseudouridine (m1ψ).

[0310] In further embodiments, the mRNA comprises the following elements for example in 5′- to 3′-direction:
[0311] A) a cap1 structure for example as defined herein;
[0312] B) a 5′-UTR derived from a HSD17B4 gene as defined herein;
[0313] C) at least one cds encoding an antigenic polypeptide which is selected or derived from Escherichia coli FimH as defined herein, wherein the coding sequence that comprises at least one of the nucleic acid sequences being identical or at least 70%, 80%, 85%, 86%, 87%, 88%, 89%, 90%, 91%, 92%, 93%, 94%, 95%, 96%, 97%, 98%, or 99% identical to the sequences according to any one of SEQ ID NOs: 523-545, 548-570, 573-595, 598-620, 623-645, 648-670, or a fragment or a fragment or variant thereof;
[0314] D) a 3′-UTR derived from a 3′-UTR of a PSMB3 gene as defined herein;
[0315] E) optionally, a histone stem-loop as defined herein;
[0316] F) a poly(A) sequence for example comprising about 100 A nucleotides;
[0317] G) optionally, chemically modified nucleotides, e.g. pseudouridine (ψ) or N1-methylpseudouridine (m1ψ).

[0318] In some embodiments, the mRNA comprises the following elements in 5′- to 3′-direction:
[0319] A) a cap1 structure as defined herein;
[0320] B) a 5′-UTR derived from a HSD17B4 gene as defined herein;
[0321] C) at least one cds encoding an antigenic polypeptide which is or is derived from Escherichia coli FimH as defined herein, for example wherein the coding sequence that comprises at least one of the nucleic acid sequences being identical or at least 70%, 80%, 85%, 86%, 87%, 88%, 89%, 90%, 91%, 92%, 93%, 94%, 95%, 96%, 97%, 98%, or 99% identical to the sequences according to any one of SEQ ID NOs: 529, 554, 579, 604, 629, 654, or a fragment or a fragment or variant thereof;
[0322] D) a 3′-UTR derived from a 3′-UTR of a PSMB3 gene as defined herein;
[0323] E) optionally, a histone stem-loop as defined herein;
[0324] F) a poly(A) sequence comprising about 100 A nucleotides, for example representing the 3′ terminus;
[0325] G) optionally, chemically modified nucleotides, e.g. pseudouridine (ψ) or N1-methylpseudouridine (m1ψ).

[0326] In some embodiments, the mRNA comprises the following elements in 5′- to 3′-direction:
[0327] A) a cap1 structure as defined herein;
[0328] B) a 5′-UTR derived from a HSD17B4 gene as defined herein;
[0329] C) at least one cds encoding an antigenic polypeptide which is or is derived from Escherichia coli FimH as defined herein, for example wherein the coding sequence that comprises at least one of the nucleic acid sequences being identical or at least 70%, 80%, 85%, 86%, 87%, 88%, 89%, 90%, 91%, 92%, 93%, 94%, 95%, 96%, 97%, 98%, or 99% identical to the sequences according to any one of SEQ ID NOs: 533, 558, 583, 608, 633, 658, or a fragment or a fragment or variant thereof;
[0330] D) a 3′-UTR derived from a 3′-UTR of a PSMB3 gene as defined herein;
[0331] E) optionally, a histone stem-loop as defined herein;
[0332] F) a poly(A) sequence comprising about 100 A nucleotides, for example representing the 3′ terminus;
[0333] G) optionally, chemically modified nucleotides, e.g. pseudouridine (ψ) or N1-methylpseudouridine (m1ψ).

[0334] In some embodiments, the mRNA comprises the following elements in 5′- to 3′-direction:
[0335] A) a cap1 structure as defined herein;
[0336] B) a 5′-UTR derived from a HSD17B4 gene as defined herein;
[0337] C) at least one cds encoding an antigenic polypeptide which is or is derived from Escherichia coli FimH as defined herein, for example wherein the coding sequence that comprises at least one of the nucleic acid sequences being identical or at least 70%, 80%, 85%, 86%, 87%, 88%, 89%, 90%, 91%, 92%, 93%, 94%, 95%, 96%, 97%, 98%, or 99% identical to the sequences according to any one of SEQ ID NOs: 534, 559, 584, 609, 634, 659, or a fragment or a fragment or variant thereof;
[0338] D) a 3′-UTR derived from a 3′-UTR of a PSMB3 gene as defined herein;
[0339] E) optionally, a histone stem-loop as defined herein;
[0340] F) a poly(A) sequence comprising about 100 A nucleotides, for example representing the 3′ terminus;
[0341] G) optionally, chemically modified nucleotides, e.g. pseudouridine (ψ) or N1-methylpseudouridine (m1ψ).

[0342] RNA sequences are provided in Table 2. Therein, each row represents a specific suitable RNA construct of the disclosure (compare with Table 1), wherein the description of the construct is indicated in column A of Table 2 and the SEQ ID NOs of the amino acid sequence of the respective construct is provided in column B. The corresponding SEQ ID NOs of the coding sequences encoding the respective constructs are provided in Table 1.

[0343] The corresponding RNA sequences, in particular mRNA sequences are provided in columns C and D, wherein column C provides RNA sequences with an UTR combination “HSD17B4/PSMB3” and a 3′-terminal hSL-A100 tail and wherein column 0 provides nucleic acid sequences with an UTR combination “HSD17B4/PSMB3” and 3′-terminal A100 tail.

TABLE 2
RNA constructs.

| row | A | B | C | D |
|---|---|---|---|---|
| 1 | Ec(J96)-FimC(1-36)_ | 496 | 671, 696, | 971, 996, |
| | Ec(J96)-FimC(37-241); | | 821, 846 | 1121, 1146 |
| | construct #1 | | | |
| 2 | HslgE(1-18)_Ec(J96)- | 497 | 672, 697, | 972, 997, |
| | FimC(37-241); construct #2 | | 822, 847 | 1122, 1147 |
| 3 | Ec(J96)-FimH(1-21)_ | 498 | 673, 698, | 973, 998, |
| | Ec(J96)-FimH(22-300); | | 823, 848 | 1123, 1148 |
| | construct #3 | | | |
| 4 | HslgE(1-18)_Ec(J96)- | 499 | 674, 699, | 974, 999, |
| | FimH(22-300); construct #4 | | 824, 849 | 1124, 1149 |
| 5 | MmlgK(1-20)_Ec(J96)- | 500 | 675, 700, | 975, 1000, |
| | FimH(22-300); construct #5 | | 825, 850 | 1125, 1150 |
| 6 | Ec(J96)-FimH(1-21)_Ec(J96)- | 501 | 676, 701, | 976, 1001, |
| | FimH(22-300)_Linker- | | 826,851 | 1126, 1151 |
| | PGDGN_Ec(J96)- | | | |
| | FimG(24-37); construct #6 | | | |
| 7 | HslgE(1-18)_Ec(J96)- | 502 | 677, 702, | 977, 1002, |
| | FimH(22-300)_Linker- | | 827, 852 | 1127, 1152 |
| | PGDGN_Ec(J96)- | | | |
| | FimG(24-37); construct #7 | | | |
| 8 | HslgE(1-18)_Ec(J96)- | 503 | 678, 703, | 978, 1003, |
| | FimH(22-300)_Linker- | | 828, 853 | 1128, 1153 |
| | G4SGG_Ec(J96)- | | | |
| | FimG(24-37); construct #8 | | | |
| 9 | MmlgK(1-20)_Ec(J96)- | 504 | 679, 704, | 979, 1004, |
| | FimH(22-300)_Linker- | | 829, 854, | 1129, 1154 |
| | PGDGN_Ec(J96)- | | 1271, | |
| | FimG(24-37); construct #9 | | 1274 | |
| 10 | MmlgK(1-20)_Ec(536)- | 505 | 680, 705, | 980, 1005, |
| | FimH(22-300)_Linker- | | 830, 855 | 1130, 1155 |
| | PGDGN_Ec(J96)- | | | |
| | FimG(24-37); construct #10 | | | |
| 11 | HslgE(1-18)_Ec(J96)- | 506 | 681, 706, | 981, 1006, |
| | FimH(22-300)_Linker- | | 831, 856 | 1131, 1156 |
| | (G4S)3_Ec(J96)- | | | |
| | FimC(135-148); construct #11 | | | |
| 12 | LumSynth(1-154_C37A_ | 507 | 682, 707, | 982, 1007, |
| | N102D)_Linker(GGS)4- | | 832, 857 | 1132, 1157 |
| | GGG_Ec(J96)- | | | |
| | FimH(22-300)_Linker- | | | |
| | PGDGN_Ec(J96)- | | | |
| | FimG(24-37); construct #12 | | | |
| 13 | HslgE(1-18)_Ec(J96)- | 508 | 683, 708, | 983, 1008, |
| | FimH(22-300)_Linker- | | 833, 858, | 1133, 1158 |
| | PGDGN_Ec(J96)- | | 1272, | |
| | FimG(24-37)_Linker- | | 1275 | |
| | SGG_LumSynth(1-154_ | | | |
| | C37A_N102D); construct #13 | | | |
| 14 | HslgE(1-18)_Ec(J96)- | 509 | 684, 709, | 984, 1009, |
| | FimH(22-300)_Linker- | | 834, 859, | 1134, 1159 |
| | PGDGN_Ec(J96)- | | 1273, | |
| | FimG(24-37)_Linker- | | 1276 | |
| | SGG_Ferritin(5-167_N19Q); | | | |
| | construct #14 | | | |
| 15 | MmlgK(1-20)_Ec(J96)- | 510 | 685, 710, | 985, 1010, |
| | FimH(22-300)_Linker- | | 835, 860 | 1135, 1160 |
| | PGDGN_Ec(J96)- | | | |
| | FimG(24-37)_Linker- | | | |
| | (GGS)4_Ferritin(5-166); | | | |
| | construct #15 | | | |
| 16 | HslgE(1-18)_Ec(J96)- | 511 | 686, 711, | 986, 1011, |
| | FimH(22-300)_Linker- | | 836, 861 | 1136, 1161 |
| | PGDGN_Ec(J96)-FimG(24- | | | |
| | 37)_TMdomain-HA(510- | | | |
| | 566); construct #16 | | | |
| 17 | HslgE(1-18)_LumSynth(1- | 512 | 687, 712, | 987, 1012, |
| | 154_C37A_N102D)_ | | 837, 862 | 1137, 1162 |
| | Linker(GGS)4-GGG_Ec(J96)- | | | |
| | FimH(22-300)_Linker- | | | |
| | PGDGN_Ec(J96)-FimG(24-37); | | | |
| | construct #17 | | | |
| 18 | HslgE(1-18)_Ec(J96)-FimH(22- | 513 | 688, 713, | 988, 1013, |
| | 300_N28S_N91S_N249Q)_ | | 838, 863 | 1138, 1163 |
| | Linker-PGDGN_Ec(J96)- | | | |
| | FimG(24-37)_Linker- | | | |
| | SGG_LumSynth(1- | | | |
| | 154_C37A_N102D); | | | |
| | construct #18 | | | |
| 19 | HslgE(1-18)_Ec(J96)-FimH(22- | 514 | 689, 714, | 989, 1014, |
| | 300_N28S_N91S_ | | 839, 864 | 1139, 1164 |
| | N249Q_N256D)_Linker- | | | |
| | PGDGN_Ec(J96)-FimG(24-37)_ | | | |
| | Linker-SGG_LumSynth(1-154_ | | | |
| | C37A_N102D); construct #19 | | | |
| 20 | HslgE(1-18)_Ec(J96)-FimH(22- | 515 | 690, 715, | 990, 1015, |
| | 300_N28S_V48C_L55C_N91S_ | | 840, 865 | 1140, 1165 |
| | N249Q)_Linker-PGDGN_Ec(J96)- | | | |
| | FimG(24-37)_Linker- | | | |
| | SGG_LumSynth(1-154_ | | | |
| | C37A_N102D); construct #20 | | | |
| 21 | HslgE(1-18)_Ec(J96)- | 516 | 691, 716, | 991, 1016, |
| | FimH(22-300_F165V)_Linker- | | 841, 866 | 1141, 1166 |
| | PGDGN_Ec(J96)- | | | |
| | FimG(24-37)_Linker- | | | |
| | SGG_LumSynth(1-154_ | | | |
| | C37A_N102D); construct #21 | | | |
| 22 | HslgE(1-18)_Ec(J96)-FimH(22- | 517 | 692, 717, | 992, 1017, |
| | 300_N28S_N91S_N249Q)_ | | 842, 867 | 1142, 1167 |
| | Linker-PGDGN_Ec(J96)- | | | |
| | FimG(24-37)_Linker-SGG_ | | | |
| | Ferritin(5-167_N19Q); | | | |
| | construct #22 | | | |
| 23 | HslgE(1-18)_Ec(J96)-FimH(22- | 518 | 693, 718, | 993, 1018, |
| | 300_N28S_N91S_ | | 843, 868 | 1143, 1168 |
| | N249Q_N256D)_Linker- | | | |
| | PGDGN_Ec(J96)- | | | |
| | FimG(24-37)_Linker- | | | |
| | SGG_Ferritin(5-167_N19Q); | | | |
| | construct #23 | | | |
| 24 | HslgE(1-18)_Ec(J96)-FimH(22- | 519 | 694, 719, | 994, 1019, |
| | 300_N28S_V48C_L55C_ | | 844, 869 | 1144, 1169 |
| | N91S_N249Q)_Linker- | | | |
| | PGDGN_Ec(J96)-FimG(24- | | | |
| | 37)_Linker-SGG_Ferritin(5- | | | |
| | 167_N19Q); construct #24 | | | |
| 25 | HslgE(1-18)_Ec(J96)- | 520 | 695, 720, | 995, 1020, |
| | FimH(22-300_F165V)_Linker- | | 845, 870 | 1145, 1170 |
| | PGDGN_Ec(J96)-FimG(24- | | | |
| | 37)_Linker-SGG_Ferritin(5- | | | |
| | 167_N19Q); construct #25 | | | |

Ec: Escherichia coli; HA: Hemagglutinin; Hs: Homo sapiens; IgE: immunoglobulin E; IgK: immunoglobulin Kappa; LumSynth, LS: Lumazine synthase; Mm: Mus musculus; TMdomain, TM: transmembrane domain

[0344] In some embodiments, the coding RNA comprises or consists of a nucleic acid sequence which is identical or at least 70%, 80%, 85%, 86%, 87%, 88%, 89%, 90%, 91%, 92%, 93%, 94%, 95%, 96%, 97%, 98%, or 99% identical to a nucleic acid sequence according to any one of SEQ ID NOs: 673-695, 698-720, 723-745, 748-770, 773-795, 798-820, 823-845, 848-870, 873-895, 898-920, 923-945, 948-970, 973-995, 998-1020, 1023-1045, 1048-1070, 1073-1095, 1098-1120, 1123-1145, 1148-1170, 1173-1195, 1198-1220, 1223-1245, 1248-1270 or a fragment or variant thereof.

[0345] In further embodiments, the coding RNA comprises or consists of a nucleic acid sequence which is identical or at least 70%, 80%, 85%, 86%, 87%, 88%, 89%, 90%, 91%, 92%, 93%, 94%, 95%, 96%, 97%, 98%, or 99% identical to a nucleic acid sequence according to any one of SEQ ID NOs: 673-695, 698-720, 723-745, 748-770, 773-795, 798-820, 823-845, 848-870, 873-895, 898-920, 923-945, 948-970, 973-995, 998-1020, 1023-1045, 1048-1070, 1073-1095, 1098-1120, 1123-1145, 1148-1170, 1173-1195, 1198-1220, 1223-1245, 1248-1270 or a fragment or variant thereof, wherein at least one, for example all uracil nucleotides in said RNA sequences are replaced by pseudouridine (ψ) nucleotides and/or N1-methylpseudouridine (m1ψ) nucleotides. In one embodiment, the coding RNA comprises or consists of a nucleic acid sequence which is identical or at least 70%, 80%, 85%, 86%, 87%, 88%, 89%, 90%, 91%, 92%, 93%, 94%, 95%, 96%, 97%, 98%, or 99% identical to a nucleic acid sequence according to any one of SEQ ID NOs: 1271-1273 or a fragment or variant thereof, wherein all uracil nucleotides in said RNA sequences are replaced by N1-methylpseudouridine (m1ψ) nucleotides. In one embodiment, the coding RNA comprises or consists of a nucleic acid sequence which is identical or at least 70%, 80%, 85%, 86%, 87%, 88%, 89%, 90%, 91%, 92%, 93%, 94%, 95%, 96%, 97%, 98%, or 99% identical to a nucleic acid sequence according to any one of SEQ ID NOs: 1274-1276 or a fragment or variant thereof, wherein all uracil nucleotides in said RNA sequences are replaced by pseudouridine (ψ) nucleotides.

[0346] In one embodiment, the coding RNA comprises or consists of a nucleic acid sequence which is identical or at least 70%, 80%, 85%, 86%, 87%, 88%, 89%, 90%, 91%, 92%, 93%, 94%, 95%, 96%, 97%, 98%, or 99% identical to a nucleic acid sequence according to any one of SEQ ID NOs: 679, 704, 729, 754, 779, 804, 829, 854, 879, 904, 929, 954, 979, 1004, 1029, 1054, 1079, 1104, 1129, 1154, 1179, 1204, 1229, 1254 or a fragment or variant thereof. In that embodiment, said RNA sequences optionally comprise a 5′-terminal cap1 structure. In that embodiment, said RNA sequences do optionally not comprise chemically modified nucleotides.

[0347] In one embodiment, the coding RNA comprises or consists of a nucleic acid sequence which is identical or at least 70%, 80%, 85%, 86%, 87%, 88%, 89%, 90%, 91%, 92%, 93%, 94%, 95%, 96%, 97%, 98%, or 99% identical to a nucleic acid sequence according to any one of SEQ ID NOs: 683, 708, 733, 758, 783, 808, 833, 858, 883, 908, 933, 958, 983, 1008, 1033, 1058, 1083, 1108, 1133, 1158, 1183, 1208, 1233, 1258 or a fragment or variant thereof. In that embodiment, said RNA sequences optionally comprise a 5′-terminal cap1 structure. In that embodiment, said RNA sequences do optionally not comprise chemically modified nucleotides.

[0348] In one embodiment, the coding RNA comprises or consists of a nucleic acid sequence which is identical or at least 70%, 80%, 85%, 86%, 87%, 88%, 89%, 90%, 91%, 92%, 93%, 94%, 95%, 96%, 97%, 98%, or 99% identical to a nucleic acid sequence according to any one of SEQ ID NOs: 684, 709, 734, 759, 784, 809, 834, 859, 884, 909, 934, 959, 984, 1009, 1034, 1059, 1084, 1109, 1134, 1159, 1184, 1209, 1234, 1259 or a fragment or variant thereof. In that embodiment, said RNA sequences optionally comprise a 5′-terminal cap1 structure. In that embodiment, said RNA sequences do optionally not comprise chemically modified nucleotides.

[0349] In one embodiment, the coding RNA comprises or consists of a nucleic acid sequence which is identical or at least 70%, 80%, 85%, 86%, 87%, 88%, 89%, 90%, 91%, 92%, 93%, 94%, 95%, 96%, 97%, 98%, or 99% identical to a nucleic acid sequence according to any one of SEQ ID NOs: 679, 704, 729, 754, 779, 804, 829, 854, 879, 904, 929, 954, 979, 1004, 1029, 1054, 1079, 1104, 1129, 1154, 1179, 1204, 1229, 1254 or a fragment or variant thereof. In that embodiment, said RNA sequences optionally comprise a 5′-terminal cap1 structure. In that embodiment, said RNA sequences optionally comprise pseudouridine (ψ) nucleotides.

[0350] In one embodiment, the coding RNA comprises or consists of a nucleic acid sequence which is identical or at least 70%, 80%, 85%, 86%, 87%, 88%, 89%, 90%, 91%, 92%, 93%, 94%, 95%, 96%, 97%, 98%, or 99% identical to a nucleic acid sequence according to any one of SEQ ID NOs: 683, 708, 733, 758, 783, 808, 833, 858, 883, 908, 933, 958, 983, 1008, 1033, 1058, 1083, 1108, 1133, 1158, 1183, 1208, 1233, 1258 or a fragment or variant thereof. In that embodiment, said RNA sequences optionally comprise a 5′-terminal cap1 structure. In that embodiment, said RNA sequences optionally comprise pseudouridine (ψ) nucleotides.

[0351] In one embodiment, the coding RNA comprises or consists of a nucleic acid sequence which is identical or at least 70%, 80%, 85%, 86%, 87%, 88%, 89%, 90%, 91%, 92%, 93%, 94%, 95%, 96%, 97%, 98%, or 99% identical to a nucleic acid sequence according to any one of SEQ ID NOs: 684, 709, 734, 759, 784, 809, 834, 859, 884, 909, 934, 959, 984, 1009, 1034, 1059, 1084, 1109, 1134, 1159, 1184, 1209, 1234, 1259 or a fragment or variant thereof. In that embodiment, said RNA sequences optionally comprise a 5′-terminal cap1 structure. In that embodiment, said RNA sequences optionally comprise pseudouridine (ψ) nucleotides.

[0352] In one embodiment, the coding RNA comprises or consists of a nucleic acid sequence which is identical or at least 70%, 80%, 85%, 86%, 87%, 88%, 89%, 90%, 91%, 92%, 93%, 94%, 95%, 96%, 97%, 98%, or 99% identical to a nucleic acid sequence according to any one of SEQ ID NOs: 679, 704, 729, 754, 779, 804, 829, 854, 879, 904, 929, 954, 979, 1004, 1029, 1054, 1079, 1104, 1129, 1154, 1179, 1204, 1229, 1254 or a fragment or variant thereof. In that embodiment, said RNA sequences optionally comprise a 5′-terminal cap1 structure. In that, said RNA sequences optionally comprise N1-methylpseudouridine (m1ψ) nucleotides.

[0353] In one embodiment, the coding RNA comprises or consists of a nucleic acid sequence which is identical or at least 70%, 80%, 85%, 86%, 87%, 88%, 89%, 90%, 91%, 92%, 93%, 94%, 95%, 96%, 97%, 98%, or 99% identical to a nucleic acid sequence according to any one of SEQ ID NOs: 683, 708, 733, 758, 783, 808, 833, 858, 883, 908, 933, 958, 983, 1008, 1033, 1058, 1083, 1108, 1133, 1158, 1183, 1208, 1233, 1258 or a fragment or variant thereof. In that embodiment, said RNA sequences optionally comprise a 5′-terminal cap1 structure. In that embodiment, said RNA sequences optionally comprise N1-methylpseudouridine (m1ψ) nucleotides.

[0354] In one embodiment, the coding RNA comprises or consists of a nucleic acid sequence which is identical or at least 70%, 80%, 85%, 86%, 87%, 88%, 89%, 90%, 91%, 92%, 93%, 94%, 95%, 96%, 97%, 98%, or 99% identical to a nucleic acid sequence according to any one of SEQ ID NOs: 684, 709, 734, 759, 784, 809, 834, 859, 884, 909, 934, 959, 984, 1009, 1034, 1059, 1084, 1109, 1134, 1159, 1184, 1209, 1234, 1259 or a fragment or variant thereof. In that embodiment, said RNA sequences optionally comprise a 5′-terminal cap1 structure. In that embodiment, said RNA sequences optionally comprise N1-methylpseudouridine (m1ψ) nucleotides.

[0355] In other embodiments, the coding RNA of the disclosure is a 5′ capped (cap1) mRNA that comprises or consists of an RNA sequence consisting of non-modified ribonucleotides (A, G, C, U) which is identical to an RNA sequence according to any one of SEQ ID NOs: 679, 829, 979, 1129 or a fragment or variant thereof.

[0356] In other embodiments, the coding RNA of the disclosure is a 5′ capped (cap1) mRNA that comprises or consists of an RNA sequence consisting of non-modified ribonucleotides (A, G, C, U) which is identical to an RNA sequence according to any one of SEQ ID NOs: 683, 833, 983, 1133, or a fragment or variant thereof.

[0357] In other embodiments, the coding RNA of the disclosure is a 5′ capped (cap1) mRNA that comprises or consists of an RNA sequence consisting of non-modified ribonucleotides (A, G, C, U) which is identical to an RNA sequence according to any one of SEQ ID NOs: 684, 834, 984, 1134, or a fragment or variant thereof.

[0358] In one embodiment, the coding RNA of the disclosure is a 5′ capped (cap1) mRNA that comprises or consists of an RNA sequence consisting of non-modified ribonucleotides (A, G, C) and chemically modified pseudouridine (ψ) ribonucleotides which is identical to an RNA sequence according to any one of SEQ ID NOs: 679, 829, 979, 1129, 1274 or a fragment or thereof.

[0359] In one embodiment, the coding RNA of the disclosure is a 5′ capped (cap1) mRNA that comprises or consists of an RNA sequence consisting of non-modified ribonucleotides (A, G, C) and chemically modified pseudouridine (ψ) ribonucleotides which is identical to an RNA sequence according to any one of SEQ ID NOs: 683, 833, 983, 1133, 1275 or a fragment or variant thereof.

[0360] In one embodiment, the coding RNA of the disclosure is a 5′ capped (cap1) mRNA that comprises or consists of an RNA sequence consisting of non-modified ribonucleotides (A, G, C) and chemically modified pseudouridine (ψ) ribonucleotides which is identical to an RNA sequence according to any one of SEQ ID NOs: 684, 834, 984, 1134, 1276 or a fragment or variant thereof.

[0361] In one embodiment, the coding RNA of the disclosure is a 5′ capped (cap1) mRNA that comprises or consists of an RNA sequence consisting of non-modified ribonucleotides (A, G, C) and chemically modified N1-methylpseudouridine (m1ψ) ribonucleotides which is identical to an RNA sequence according to any one of SEQ ID NOs: 679, 829, 979, 1129, 1271 or a fragment or variant thereof. In one embodiment, the coding RNA of the disclosure is a 5′ capped (cap1) mRNA that comprises or consists of an RNA sequence consisting of non-modified ribonucleotides (A, G, C) and chemically modified N1-methylpseudouridine (m1ψ) ribonucleotides which is identical to an RNA sequence according to any one of SEQ ID NOs: 683, 833, 983, 1133, 1272 or a fragment or variant thereof.

[0362] In one embodiment, the coding RNA of the disclosure is a 5′ capped (cap1) mRNA that comprises or consists of an RNA sequence consisting of non-modified ribonucleotides (A, G, C) and chemically modified N1-methylpseudouridine (m1ψ) ribonucleotides which is identical to an RNA sequence according to any one of SEQ ID NOs: 684, 834, 984, 1134, 1273 or a fragment or variant thereof.

2: Composition Comprising a Coding RNA Encoding an Antigenic Polypeptide of Escherichia coli FimH

[0363] In a second aspect, it is provided a pharmaceutical composition comprising the coding RNA of the first aspect.

[0364] Notably, embodiments relating to the pharmaceutical composition of the second aspect may likewise be read on and be understood as suitable embodiments of the vaccine of the third aspect. Also, embodiments relating to the vaccine of the third aspect may likewise be read on and be understood as suitable embodiments of the pharmaceutical composition of the second aspect. Furthermore, features and embodiments described in the context of the first aspect (the RNA of the disclosure) have to be read on and have to be understood as suitable embodiments of the pharmaceutical composition of the second aspect.

[0365] In the context of the disclosure, a “composition” refers to any type of composition in which the specified ingredients (e.g. coding RNA comprising (a) at least one untranslated region (UTR); and (b) a coding sequence operably linked to said UTR encoding an antigenic polypeptide which is selected or derived from Escherichia coli FimH) may be incorporated, optionally along with any further constituents, usually with at least one pharmaceutically acceptable carrier or excipient. The composition may be a dry composition such as a powder, a granule, or a solid lyophilized form. Alternatively, the composition may be in liquid form, and each constituent may be independently incorporated in dissolved or dispersed (e.g. suspended or emulsified) form.

[0366] In various embodiments, the coding RNA of the pharmaceutical composition is selected from a coding RNA as defined in any of the embodiments of the first aspect.

[0367] In embodiments, the coding RNA as comprised in the pharmaceutical composition is provided in an amount of at least about 100 ng to up to about 500 μg, in an amount of at least about 1 μg to up to about 200 μg, in an amount of about at least 1 μg to up to about 100 μg, in an amount of at least about 5 μg to up to about 100 μg, for example in an amount of at least about 10 μg to up to about 50 μg, specifically, in an amount of about 1 μg, 2 μg, 3 μg, 4 μg, 5 μg, 6 μg, 7 μg, 8 μg, 9 μg, 10 μg, 11 μg, 12 μg, 13 μg, 14 μg, 15 μg, 20 μg, 25 μg, 30 μg, 35 μg, 40 μg, 45 μg, 50 μg, 55 μg, 60 μg, 65 μg, 70 μg, 75 μg, 80 μg, 85 μg, 90 μg, 95 μg or 100 μg.

[0368] In one embodiment, the coding RNA of the composition comprises or consists of an RNA sequence identical or at least 70%, 80%, 90%, 91%, 92%, 93%, 94%, 95%, 96%, 97%, 98%, or 99% identical to any one of SEQ ID NOs: 673-695, 698-720, 723-745, 748-770, 773-795, 798-820, 823-845, 848-870, 873-895, 898-920, 923-945, 948-970, 973-995, 998-1020, 1023-1045, 1048-1070, 1073-1095, 1098-1120, 1123-1145, 1148-1170, 1173-1195, 1198-1220, 1223-1245, 1248-1270, 1271-1276 or a fragment or a variant thereof.

[0369] In some embodiments, the pharmaceutical composition comprises a plurality or at least more than one RNA species.

[0370] In one embodiment, the pharmaceutical composition comprises a first coding RNA according to the first aspect and a second coding RNA encoding a polypeptide which is selected or derived from Escherichia coli FimC.

[0371] In embodiments, the second coding sequence encodes an FimC amino acid sequence which is identical or at least 70%, 80%, 85%, 86%, 87%, 88%, 89%, 90%, 91%, 92%, 93%, 94%, 95%, 96%, 97%, 98%, or 99% identical to any one of SEQ ID NOs: 317, 324, 496, 497, or a fragment or variant thereof. This is particularly suitable when the first coding sequence encodes a FimH amino acid sequence which is identical or at least 70%, 80%, 85%, 86%, 87%, 88%, 89%, 90%, 91%, 92%, 93%, 94%, 95%, 96%, 97%, 98%, or 99% identical to any one of SEQ ID NOs: 177-186, 247-256, particularly SEQ ID NOs: 498, 500 or is an immunogenic fragment or immunogenic variant thereof.

[0372] In embodiments, the second coding RNA comprises a FimC coding sequence that comprises at least one of the nucleic acid sequences being identical or at least 70%, 80%, 85%, 86%, 87%, 88%, 89%, 90%, 91%, 92%, 93%, 94%, 95%, 96%, 97%, 98%, or 99% identical to the sequences according to any one of SEQ ID NOs: 318-323, 325-330, 521, 522, 546, 547, 571, 572, 596, 597, 621, 622, 646, 647, or a fragment or variant thereof. This is particularly suitable when the first coding sequence comprises a FimH coding sequence that comprises at least one of the nucleic acid sequences being identical or at least 70%, 80%, 85%, 86%, 87%, 88%, 89%, 90%, 91%, 92%, 93%, 94%, 95%, 96%, 97%, 98%, or 99% identical to any one of SEQ ID NOs: 187-246, 257-316, 523, 525, 548, 550, 573, 575, 598, 600, 623, 625, 648, 650.

[0373] In embodiments, the second coding RNA comprises or consists of a FimC coding nucleic acid sequence which is identical or at least 70%, 80%, 85%, 86%, 87%, 88%, 89%, 90%, 91%, 92%, 93%, 94%, 95%, 96%, 97%, 98%, or 99% identical to a nucleic acid sequence according to any one of SEQ ID NOs: 671, 672, 696, 697, 721, 722, 746, 747, 771, 772, 796, 797, 821, 822, 846, 847, 871, 872, 896, 897, 921, 922, 946, 947, 971, 972, 996, 997, 1021, 1022, 1046, 1047, 1071, 1072, 1096, 1097, 1121, 1122, 1146, 1147, 1171, 1172, 1196, 1197, 1221, 1222, 1246, 1247, or a fragment or variant of any of these sequences, optionally wherein at least one, for example all uracil nucleotides in said RNA sequences are replaced by pseudouridine (ψ) nucleotides and/or N1-methylpseudouridine (m1ψ) nucleotides.

[0374] Notably, suitable nucleic acid features (e.g. UTRs, cap structures, modifications, codon optimizations) that are disclosed in the context of FimH encoding RNA sequences of the first aspect may also apply and may also be suitable for FimC encoding RNA sequences of second aspect.

[0375] Specific features and embodiments relating to the coding RNA of the first aspect as provided herein may also apply for the second coding RNA encoding FimC. Providing a pharmaceutical composition comprising a first coding RNA encoding FimH and a second coding RNA encoding FimC is particularly suitable so that, once the FimH and FimC polypeptides encoded by the first and second coding RNA are translated, they can assemble in a non-covalent complex. This is particularly suitable in order to stabilise FimH when the coding sequence of the first RNA encoding FimH does not encode a donor strand peptide.

[0376] E. coli FimC sequences and constructs are reported in Table 1 and Table 2.

[0377] In various embodiments, the coding RNA of the pharmaceutical composition is formulated with a pharmaceutically acceptable carrier or excipient.

[0378] The term “pharmaceutically acceptable carrier” or “pharmaceutically acceptable excipient” as used herein for example includes the liquid or non-liquid basis of the composition for administration. If the composition is provided in liquid form, the carrier may be water, e.g. pyrogen-free water; isotonic saline or buffered (aqueous) solutions, e.g. phosphate, citrate etc. buffered solutions. Water or for example a buffer, for example an aqueous buffer, may be used, comprising e.g. a sodium salt, a calcium salt, or a potassium salt. According to some embodiments, the sodium, calcium or potassium salts may occur in the form of their halogenides, e.g. chlorides, iodides, or bromides, in the form of their hydroxides, carbonates, hydrogen carbonates, or sulphates, etc. Examples of sodium salts include NaCl, Na₂HPO₄, NaI, NaBr, Na₂CO₃, NaHCO₃, Na₂SO₄, examples of the optional potassium salts include KCl, KI, KBr, K₂CO₃, KHCO₃, K₂SO₄, and examples of calcium salts include CaCl₂, CaI₂, CaBr₂, CaCO₃, CaSO₄, Ca(OH)₂.

[0379] Furthermore, organic anions of the aforementioned cations may be in the buffer. Accordingly, in embodiments, the pharmaceutical composition may comprise pharmaceutically acceptable carriers or excipients using one or more pharmaceutically acceptable carriers or excipients to e.g. increase stability, increase cell transfection, permit the sustained or delayed, increase the translation of encoded antigenic polypeptide in vivo, and/or alter the release profile of encoded antigenic peptide in vivo. In addition to traditional excipients such as any and all solvents, dispersion media, diluents, or other liquid vehicles, dispersion or suspension aids, surface active agents, isotonic agents, thickening or emulsifying agents, preservatives, excipients of the present disclosure can include, without limitation, lipidoids, liposomes, lipid nanoparticles, polymers, lipoplexes, core-shell nanoparticles, peptides, proteins, cells transfected with polynucleotides, hyaluronidase, nanoparticle mimics and combinations thereof. In embodiments, one or more compatible solid or liquid fillers or diluents or encapsulating compounds may be used as well, which are suitable for administration to a subject. The term “compatible” as used herein means that the constituents of the composition are capable of being mixed with the at least one nucleic acid and, optionally, a plurality of nucleic acids of the composition, in such a manner that no interaction occurs, which would substantially reduce the biological activity or the pharmaceutical effectiveness of the composition under typical use conditions (e.g. intramuscular or intradermal administration). Pharmaceutically acceptable carriers or excipients must have sufficiently high purity and sufficiently low toxicity to make them suitable for administration to a subject to be treated. Compounds which may be used as pharmaceutically acceptable carriers or excipients may be sugars, such as, for example, lactose, glucose, trehalose, mannose, and sucrose; starches, such as, for example, corn starch or potato starch; dextrose; cellulose and its derivatives, such as, for example, sodium carboxymethylcellulose, ethylcellulose, cellulose acetate; powdered tragacanth; malt; gelatin; tallow; solid glidants, such as, for example, stearic acid, magnesium stearate; calcium sulfate; vegetable oils, such as, for example, groundnut oil, cottonseed oil, sesame oil, olive oil, corn oil and oil from theobroma; polyols, such as, for example, polypropylene glycol, glycerol, sorbitol, mannitol and polyethylene glycol; alginic acid.

[0380] Pharmaceutical compositions of the present disclosure are suitably sterile and/or pyrogen-free.

### Formulation/Complexation:

[0381] In some embodiments, the coding RNA of the pharmaceutical composition is complexed or associated with at least one further compound to obtain a formulated composition. A formulation in that context may have the function of a transfection agent. A formulation in that context may also have the function of protecting the RNA from degradation, e.g. to allow storage, shipment, etc.

[0382] In some embodiments, the coding RNA of the pharmaceutical composition is formulated with at least one compound, e.g. peptides, proteins, lipids, polysaccharides, and/or polymers.

[0383] In some embodiments, the coding RNA of the pharmaceutical composition is formulated with at least one cationic (cationic or for example ionizable) or polycationic compound (cationic or for example ionizable).

[0384] In some embodiments, the coding RNA of the pharmaceutical composition is complexed or associated with or at least partially complexed or partially associated with one or more cationic (cationic or for example ionizable) or polycationic compound.

[0385] The term “cationic or polycationic compound” as used herein will be recognized and understood by the person of ordinary skill in the art, and are for example intended to refer to a charged molecule, which is positively charged at a pH value ranging from about 1 to 9, at a pH value ranging from about 3 to 8, at a pH value ranging from about 4 to 8, at a pH value ranging from about 5 to 8, for example at a pH value ranging from about 6 to 8, for example at a pH value ranging from about 7 to 8, for example at a physiological pH, e.g. ranging from about 7.2 to about 7.5. Accordingly, a cationic component, e.g. a cationic peptide, cationic protein, cationic polymer, cationic polysaccharide, cationic lipid may be any positively charged compound or polymer which is positively charged under physiological conditions. A “cationic or polycationic peptide or protein” may contain at least one positively charged amino acid, or more than one positively charged amino acid, e.g. selected from Arg, His, Lys or Orn. Accordingly, “polycationic” components are also within the scope exhibiting more than one positive charge under the given conditions.

[0386] In some embodiments, the at least one cationic or polycationic compound is selected from a cationic or polycationic polymer, a cationic or polycationic polysaccharide, a cationic or polycationic lipid, a cationic or polycationic protein, a cationic or polycationic peptide, or any combinations thereof.

[0387] In some embodiments, the at least one cationic or polycationic compound is selected from a cationic or polycationic peptide or protein.

[0388] In some embodiments, the pharmaceutical composition comprises a coding RNA as defined herein, and a polymeric carrier.

[0389] The term “polymeric carrier” as used herein will be recognized and understood by the person of ordinary skill in the art, and are e.g. intended to refer to a compound that facilitates transport and/or complexation of another compound. A polymeric carrier is typically a carrier that is formed of a polymer. A polymeric carrier may be associated to its cargo (e.g. RNA) by covalent or non-covalent interaction. A polymer may be based on different subunits, such as a copolymer. Suitable polymeric carriers in that context may include, for example, polyethylenimine (PEI).

[0390] In embodiments, the pharmaceutical composition comprises at least one RNA that is complexed or associated with polymeric carriers and, optionally, with at least one lipid component as described in WO2017212008, WO2017212006, WO2017212007, and WO2017212009. In this context, the disclosures of WO2017212008, WO2017212006, WO2017212007, and WO2017212009 are herewith incorporated by reference. In some embodiments, the lipidoid component of the polymeric carrier may be any one selected from the table of lipidoid structures of published PCT patent application WO2017212009A1 (pages 50-54).

### Formulation in Lipid-Based Carriers:

[0391] In some embodiments, the pharmaceutical composition comprises lipid-based carriers.

[0392] In the context of the disclosure, the term “lipid-based carriers” encompass lipid based delivery systems for RNA that comprise a lipid component. A lipid-based carrier may additionally comprise other components suitable for encapsulating/incorporating/complexing an RNA including a cationic or polycationic polymer, a cationic or polycationic polysaccharide, a cationic or polycationic protein, a cationic or polycationic peptide, or any combinations thereof.

[0393] In the context of the disclosure, a typical “lipid-based carrier” is selected from liposomes, lipid nanoparticles (LNPs), lipoplexes, and/or nanoliposomes. The RNA of the pharmaceutical composition may completely or partially incorporated or encapsulated in a lipid-based carrier, wherein the RNA may be located in the interior space of the lipid-based carrier, within the lipid layer/membrane of the lipid-based carrier, or associated with the exterior surface of the lipid-based carrier. The incorporation of RNA into lipid-based carriers may be referred to as “encapsulation”. A “lipid-based carrier” is not restricted to any particular morphology, and include any morphology generated when e.g. an aggregation reducing lipid and at least one further lipid are combined, e.g. in an aqueous environment in the presence of RNA. For example, an LNP, a liposome, a lipid complex, a lipoplex and the like are within the scope of the term “lipid-based carrier”. Lipid-based carriers can be of different sizes such as, but not limited to, a multilamellar vesicle (MLV) which may be hundreds of nanometers in diameter and may contain a series of concentric bilayers separated by narrow aqueous compartments, a small unicellular vesicle (SUV) which may be smaller than 50 nm in diameter, and a large unilamellar vesicle (LUV) which may be between 50 nm and 500 nm in diameter. Liposomes, a specific type of lipid-based carrier, are characterized as microscopic vesicles having an interior aqua space sequestered from an outer medium by a membrane of one or more bilayers. In a liposome, the at least one RNA is typically located in the interior aqueous space enveloped by some or the entire lipid portion of the liposome. Bilayer membranes of liposomes are typically formed by amphiphilic molecules, such as lipids of synthetic or natural origin that comprise spatially separated hydrophilic and hydrophobic domains. Lipid nanoparticles (LNPs), a specific type of lipid-based carrier, are characterized as microscopic lipid particles having a solid core or partially solid core. Typically, an LNP does not comprise an interior aqua space sequestered from an outer medium by a bilayer. In an LNP, the at least one RNA may be encapsulated or incorporated in the lipid portion of the LNP enveloped by some or the entire lipid portion of the LNP. An LNP may comprise any lipid capable of forming a particle to which the RNA may be attached, or in which the RNA may be encapsulated. For example, said lipid-based carriers are particularly suitable for intramuscular and/or intradermal administration.

[0394] In some embodiments, the lipid-based carriers of the pharmaceutical composition are selected from liposomes, lipid nanoparticles, lipoplexes, and/or nanoliposomes.

[0395] In one embodiment, the lipid-based carriers of the pharmaceutical composition are lipid nanoparticles (LNPs). In one embodiment, the lipid nanoparticles of the pharmaceutical composition encapsulate the coding RNA of the disclosure.

[0396] The term “encapsulated”, e.g. incorporated, complexed, encapsulated, partially encapsulated, associated, partially associated, refers to the essentially stable combination of RNA with one or more lipids into lipid-based carriers (e.g. larger complexes or assemblies) for example without covalent binding of the RNA. The lipid-based carriers—encapsulated RNA may be completely or partially located in the interior of the lipid-based carrier (e.g. the lipid portion and/or an interior space) and/or within the lipid layer/membrane of the lipid-based carriers. The encapsulation of an RNA into lipid-based carriers is also referred to herein as “incorporation” as the RNA is for example contained within the interior of the lipid-based carriers. Without wishing to be bound to theory, the purpose of incorporating or encapsulating RNA into lipid-based carriers may be to protect the RNA from an environment which may contain enzymes, chemicals, or conditions that degrade the RNA. Moreover, incorporating RNA into lipid-based carriers may promote the uptake of the RNA, and hence, may enhance the therapeutic effect of the RNA when administered to a cell or a subject.

[0397] In some embodiments, the lipid-based carriers of the pharmaceutical composition comprise at least one or more lipids selected from at least one aggregation-reducing lipid, at least one cationic lipid, at least one neutral lipid or phospholipid, or at least one steroid or steroid analogue, or any combinations thereof.

[0398] In one embodiment, the lipid-based carriers of the pharmaceutical composition comprise an aggregation-reducing lipid, a cationic lipid or ionizable lipid, a neutral lipid or phospholipid, and a steroid or steroid analogue.

### Cationic Lipids:

[0399] In some embodiments, the lipid-based carriers comprise a cationic or ionizable lipid.

[0400] The cationic or ionizable lipid of the lipid-based carriers may be cationisable or ionizable, i.e. it becomes protonated as the pH is lowered below the pK of the ionizable group of the lipid, but is progressively more neutral at higher pH values. At pH values below the pK, the lipid is then able to associate with negatively charged nucleic acids. In certain embodiments, the cationic lipid comprises a zwitterionic lipid that assumes a positive charge on pH decrease.

[0401] In some embodiments, the lipid-based carriers comprise a cationic or ionizable lipid that for example carries a net positive charge at physiological pH, for example the cationic or ionizable lipid comprises a tertiary nitrogen group or quaternary nitrogen group. Accordingly, in some embodiments, the lipid-based carriers comprise a cationic or ionizable lipid selected from an amino lipid.

[0402] In further embodiments, the lipid formulation comprises cationic or ionizable lipids as defined in Formula I of paragraph [00251] of WO2021222801 or a lipid selected from the disclosure of paragraphs [00260] or [00261] of WO2021222801. In other embodiments, the lipid formulation comprises cationic or ionizable lipids selected from the group consisting of ATX-001 to ATX-132 as disclosed in claim 90 of WO2021183563, for example ATX-0126. The disclosure of WO2021222801 and WO2021183563, especially aforementioned lipids, are incorporated herewith by reference.

[0403] In embodiments, cationic or ionizable lipids may be selected from the lipids disclosed in WO2018078053 (i.e. lipids derived from formula I, II, and III of WO2018078053, or lipids as specified in claims 1 to 12 of WO2018078053), the disclosure of WO2018078053 hereby incorporated by reference in its entirety. In that context, lipids disclosed in Table 7 of WO2018078053 (e.g. lipids derived from formula I-1 to I-41) and lipids disclosed in Table 8 of WO2018078053 (e.g. lipids derived from formula II-1 to II-36) may be suitably used in the context of the disclosure. Accordingly, formula I-1 to formula I-41 and formula II-1 to formula II-36 of WO2018078053, and the specific disclosure relating thereto, are herewith incorporated by reference.

[0404] In some embodiments, the lipid-based carriers of the pharmaceutical composition comprise a cationic lipid selected or derived from structures III-1 to III-36 of Table 9 of published PCT patent application WO2018078053. Accordingly, formula III-1 to III-36 of WO2018078053, and the specific disclosure relating thereto, are herewith incorporated by reference.

[0405] In various embodiments, the lipid-based carriers (e.g. LNPs) of the pharmaceutical composition of the disclosure (e.g. component B) comprise a cationic lipid according to formula (III) or derived from formula (III):

[chemical structure]

[0406] Formula (III) is further defined in that:
[0407] one of L1 or L2 is —O(C═O)—, —(C═O)O—, —C(═O)—, —O—, —S(O)x-, —S—S—, —C(═O)S—, SC(=O)—, —NRaC(═O)—, —C(═O)NRa—, —NRaC(═O)NRa—, —OC(═O)NRa— or —NRaC(═O)O—, and the other of L1 or L2 is —O(C═O)—, —(C═O)O—, —C(═O)—, —O—, —S(O)x-, —S—S—, —C(═O)S—, SC(═O)—, —NRaC(═O)—, —C(═O)NRa—, —NRaC(═O)NRa—, —OC(═O)NRa— or —NRaC(═O)O— or a direct bond;
[0408] G1 and G2 are each independently unsubstituted C1-C12 alkylene or C1-C12 alkenylene;
[0409] G3 is C1-C24 alkylene, C1-C24 alkenylene, C3-C8 cycloalkylene, C3-C8 cycloalkenylene;
[0410] Ra is H or C1-C12 alkyl;
[0411] R1 and R2 are each independently C6-C24 alkyl or C6-C24 alkenyl;
[0412] R3 is H, OR5, CN, C(═O)OR4, OC(═O)R4 or —NR5C(═O)R4;
[0413] R4 is C1-C12 alkyl;
[0414] R5 is H or C1-C6 alkyl; and
[0415] x is 0, 1 or 2.

[0416] In one embodiment, the lipid-based carriers comprises a cationic lipid selected or derived from formula III-3:

[chemical structure]

[0417] The lipid of formula III-3 as suitably used herein has the chemical term ((4-hydroxybutyl)azanediyl)bis(hexane-6,1-diyl)bis(2-hexyldecanoate), also referred to as ALC-0315 i.e. CAS Number 2036272-55-4.

[0418] Further suitable cationic lipids may be selected or derived from cationic lipids according to PCT claims 1 to 14 of published patent application WO2021123332, or table 1 of WO2021123332, the disclosure relating to claims 1 to 14 or table 1 of WO2021123332 herewith incorporated by reference.

[0419] Accordingly, suitable cationic lipids may be selected or derived from cationic lipids according to Compound 1 to Compound 27 (C1-C27) of Table 1 of WO2021123332.

[0420] In other embodiments, the lipid-based carriers (e.g. LNPs) of the pharmaceutical composition comprise a cationic lipid selected or derived from (COATSOME® SS-EC)SS-33/4PE-15 (see C23 in Table 1 of WO2021123332).

[0421] In other embodiments, the lipid-based carriers (e.g. LNPs) of the pharmaceutical composition comprise a cationic lipid selected or derived from HEXA-C5DE-PipSS (see C2 in Table 1 of WO2021123332). In some embodiments, the lipid-based carriers (e.g. LNPs) of the pharmaceutical composition comprise a cationic lipid selected or derived from compound C26 as disclosed in Table 1 of WO2021123332:

[chemical structure]

[0422] In other embodiments, the lipid-based carriers (e.g. LNPs) of the pharmaceutical composition comprise a cationic lipid selected or derived from 9-Heptadecanyl 8-{(2-hydroxyethyl)[6-oxo-6-(undecyloxy)hexyl]amino}octanoate, also referred to as SM-102. Other lipid-based carriers (e.g. LNPs) of the pharmaceutical composition comprise a squaramide ionizable amino lipid, for example a cationic lipid selected from the group consisting of formulas (M1) and (M2):

[chemical structure]

wherein the substituents (e.g. R₁, R₂, R₃, R₅, R₆, R₇, R₁₀, M, M₁, m, n, o, l) are defined in claims 1 to 13 of U.S. Ser. No. 10/392,341 B2; U.S. Ser. No. 10/392,341B2 being incorporated herein in its entirety.

[0423] Accordingly, in some embodiments, the lipid-based carriers (e.g. LNPs) of the pharmaceutical composition comprise a cationic lipid selected or derived from above mentioned ALC-0315, SM-102, SS-33/4PE-15, HEXA-C5DE-PipSS, or compound 026 (see 026 in Table 1 of WO2021123332).

[0424] In one embodiment, the lipid-based carriers, for example the LNPs, of the pharmaceutical composition comprise a cationic lipid selected or derived from ALC-0315.

[0425] In some embodiments, the lipid-based carriers of the disclosure comprise two or more (different) cationic lipids as defined herein.

[0426] In certain embodiments, the cationic lipid as defined herein, for example cationic lipid ALC-0315, is present in the lipid-based carriers in an amount from about 30 mol % to about 95 mol %, relative to the total lipid content of the lipid-based carriers. If more than one cationic lipid is incorporated within the lipid-based carriers, such percentages apply to the combined cationic lipids.

[0427] In embodiments, the cationic lipid is present in the lipid-based carriers in an amount from about 30 mol % to about 70 mol %. In one embodiment, the cationic lipid is present in the lipid-based carriers in an amount from about 40 mol % to about 60 mol %, such as about 40, 41, 42, 43, 44, 45, 46, 47, 48, 49, 50, 51, 52, 53, 54, 55, 56, 57, 58, 59 or 60 mol %, respectively. In embodiments, the cationic lipid is present in the lipid-based carriers in an amount from about 47 mol % to about 48 mol %, such as about 47.0, 47.1, 47.2, 47.3, 47.4, 47.5, 47.6, 47.7, 47.8, 47.9, 50.0 mol %, respectively, wherein 47.4 mol % are particularly suitable. In other embodiments, the cationic lipid is present in the lipid-based carriers in an amount from about 55 mol % to about 65 mol %, such as about 55, 56, 57, 58, 59, 60, 61, 62, 63, 64 or 65 mol %, respectively, wherein 59 mol % are particularly suitable.

[0428] In some embodiments, the cationic lipid is present in a ratio of from about 20 mol % to about 70 mol % or 75 mol % or from about 45 mol % to about 65 mol % or about 20, 25, 30, 35, 40, 45, 50, 55, 60, 65, or about 70 mol % of the total lipid present in the lipid-based carriers. In further embodiments, the LNPs comprise from about 25% to about 75% on a molar basis of cationic lipid, e.g., from about 20 to about 70%, from about 35 to about 65%, from about 45 to about 65%, about 60%, about 57.5%, about 57.1%, about 50% or about 40% on a molar basis (based upon 100% total moles of lipid in the lipid nanoparticle).

[0429] In some embodiments, the ratio of cationic lipid to RNA is from about 3 to about 15, such as from about 5 to about 13 or from about 7 to about 11.

### Aggregation Reducing Lipids:

[0430] The term “aggregation reducing lipid” refers to a molecule comprising both a lipid portion and a moiety suitable of reducing or preventing aggregation of the lipid-based carriers. Under storage conditions or during formulation, the lipid-based carriers may undergo charge-induced aggregation, a condition which can be undesirable for the stability of the lipid-based carriers. Therefore, it can be desirable to include a lipid compound which can reduce aggregation, for example by sterically stabilizing the lipid-based carriers. Such a steric stabilization may occur when a compound having a sterically bulky but uncharged moiety that shields or screens the charged portions of a lipid-based carriers from close approach to other lipid-based carriers in the composition. In the context of the disclosure, stabilization of the lipid-based carriers is achieved by including lipids which may comprise a lipid bearing a sterically bulky group which, after formation of the lipid-based carrier, is for example located on the exterior of the lipid-based carrier. Suitable aggregation reducing groups include hydrophilic groups, e.g. monosialoganglioside GM1, polyamide oligomers (PAO), or certain polymers, such as poly(oxyalkylenes), e.g. poly(ethylene glycol) or poly(propylene glycol).

[0431] Lipids comprising a polymer as aggregation reducing group are herein referred to as “polymer conjugated lipid”.

[0432] The term “polymer conjugated lipid” refers to a molecule comprising both a lipid portion and a polymer portion, wherein the polymer is suitable of reducing or preventing aggregation of lipid-based carriers comprising the RNA. A polymer has to be understood as a substance or material consisting of very large molecules, or macromolecules, composed of many repeating subunits. A suitable polymer in the context of the disclosure may be a hydrophilic polymer. An example of a polymer conjugated lipid is a PEGylated or PEG-conjugated lipid.

[0433] In one embodiment, the lipid-based carriers of the pharmaceutical composition comprise an aggregation reducing lipid selected from a polymer conjugated lipid.

[0434] In some embodiments, the polymer conjugated lipid is a PEG-conjugated lipid (or PEGylated lipid, PEG lipid).

[0435] The average molecular weight of the PEG moiety in the PEG-conjugated lipid for example ranges from about 500 to about 8,000 Daltons (e.g., from about 1,000 to about 4,000 Daltons). In one embodiment, the average molecular weight of the PEG moiety is about 2,000 Daltons.

[0436] In some embodiments, the PEG-conjugated lipid is selected from PEG-modified phosphatidylethanolamine, PEG-modified phosphatidic acid, PEG-modified ceramides (e.g. PEG-CerC14 or PEG-CerC20), PEG-modified dialkylamines, PEG-modified diacylglycerols, PEG-modified dialkylglycerols. Representative polyethylene glycol-lipids include PEG-c-DOMG, PEG-c-DMA, and PEG-s-DMG. In one embodiment, the polyethylene glycol-lipid is N-[(methoxy poly(ethylene glycol)2000)carbamyl]-1,2-dimyristyloxlpropyl-3-amine (PEG-c-DMA). In one embodiment, the polyethylene glycol-lipid is DMG-PEG 2000. In one embodiment, the polyethylene glycol-lipid is PEG-c-DOMG). In other embodiments, the LNPs comprise a PEGylated diacylglycerol (PEG-DAG) such as 1-(monomethoxy-polyethyleneglycol)-2,3-dimyristoylglycerol (PEG-DMG), a PEGylated phosphatidylethanoloamine (PEG-PE), a PEG succinate diacylglycerol (PEG-S-DAG) such as 4-O-(2′,3′-di(tetradecanoyloxy)propyl-1-O-(ω-methoxy(polyethoxy)ethyl)butanedioate (PEG-S-DMG), a PEGylated ceramide (PEG-cer), or a PEG dialkoxypropylcarbamate such as w-methoxy(polyethoxy)ethyl-N-(2,3-di(tetradecanoxy)propyl)carbamate or 2,3-di(tetradecanoxy)propyl-N-(w-methoxy(polyethoxy)ethyl)carbamate.

[0437] In some embodiments, the polymer conjugated lipid, e.g. the PEG-conjugated lipid, is selected or derived from 1,2-dimyristoyl-rac-glycero-3-methoxypolyethylene glycol-2000 (PEG2000 DMG or DMG-PEG 2000). As used in the art, “DMG-PEG 2000” is typically considered a mixture of 1,2-DMG PEG 2000 and 1,3-DMG PEG 2000 in ˜97:3 ratio.

[0438] In other embodiments, the polymer conjugated lipid, e.g. the PEG-conjugated lipid, is selected or derived from C10-PEG2K, or Cer8-PEG2K.

[0439] In one embodiment, the polymer conjugated lipid, e.g. the PEG-conjugated lipid is selected or derived from formula (IVa):

[chemical structure]

for example wherein n has a mean value ranging from 30 to 60, such as about 30±2, 32±2, 34±2, 36±2, 38±2, 40±2, 42±2, 44±2, 46±2, 48±2, 50±2, 52±2, 54±2, 56±2, 58±2, or 60±2. In one embodiment n is about 49. In another embodiment n is 45. In further embodiments said PEG lipid is of formula (IVa), wherein n is an integer selected such that the average molecular weight of the PEG lipid is about 2000 g/mol to about 3000 g/mol or about 2300 g/mol to about 2700 g/mol. In another embodiment said PEG lipid is of formula (IVa), wherein n is an integer selected such that the average molecular weight of the PEG lipid is about 2000 g/mol.

[0440] The PEG-conjugated lipid of formula Va as suitably used herein has the chemical 2[(polyethylene glycol)-2000]-N,N-ditetradecylacetamide, also referred to as ALC-0159.

[0441] Accordingly, in some embodiments, the aggregation reducing lipid is a PEG-conjugated lipid selected or derived from DMG-PEG 2000, C10-PEG2K, Cer8-PEG2K, or ALC-0159.

[0442] In one embodiment, the lipid-based carriers, for example the LNPs of the pharmaceutical composition comprise an aggregation reducing lipid selected or derived from ALC-0159.

[0443] In some embodiments, the lipid-based carriers of the pharmaceutical composition comprise an aggregation reducing lipid, wherein the aggregation reducing lipid is not a PEG-conjugated lipid.

[0444] In some embodiments, lipid-based carriers include less than about 3 mol %, 2 mol %, or 1 mol % of aggregation reducing lipid, based on the total moles of lipid in the lipid-based carrier. In further embodiments, lipid-based carriers comprise from about 0.1% to about 10% of the aggregation reducing lipid on a molar basis, e.g. about 0.5% to about 10%, about 0.5% to about 5%, about 10%, about 5%, about 4%, about 3%, about 2%, about 1.5%, about 1%, about 0.5%, or about 0.3% on a molar basis (based on 100% total moles of lipids in the lipid-based carrier). In other embodiments, lipid-based carriers comprise from about 1.0% to about 2.0% of the aggregation reducing lipid on a molar basis, e.g. about 1.2% to about 1.9%, about 1.2% to about 1.8%, about 1.3% to about 1.8%, about 1.4% to about 1.8%, about 1.5% to about 1.8%, about 1.6% to about 1.8%, in particular about 1.4%, about 1.5%, about 1.6%, about 1.7%, about 1.8%, about 1.9%, for example 1.7% (based on 100% total moles of lipids in the lipid-based carrier). In other embodiments, lipid-based carriers comprise about 2.5%, 3%, 3.5%, 4%, 4.5% or 5%, for example 2.5% of the aggregation reducing lipid on a molar basis (based on 100% total moles of lipids in the lipid-based carrier). In various embodiments, the molar ratio of the cationic lipid to the aggregation reducing lipid ranges from about 100:1 to about 25:1.

### Neutral Lipids:

[0445] In some embodiments, the lipid-based carriers (e.g. LNPs) comprise a neutral lipid or phospholipid.

[0446] The term “neutral lipid” refers to any one of a number of lipid species that exist in either an uncharged or neutral zwitterionic form at physiological pH. Suitable neutral lipids include diacylphosphatidylcholines, diacylphosphatidylethanolamines, ceramides, sphingomyelins, dihydrosphingomyelins, cephalins, and cerebrosides. The selection of neutral lipids for use in the particles described herein is generally guided by consideration of, e.g., lipid particle size and stability of the lipid particle in the bloodstream. For example, the neutral lipid is a lipid having two acyl groups (e.g. diacylphosphatidylcholine and diacylphosphatidylethanolamine). In one embodiment, the neutral lipids contain saturated fatty acids with carbon chain lengths in the range of C10 to C20. In another embodiment, neutral lipids with mono or diunsaturated fatty acids with carbon chain lengths in the range of C10 to C20 are used. Additionally, neutral lipids having mixtures of saturated and unsaturated fatty acid chains can be used.

[0447] In some embodiments, the lipid-based carriers comprises one or more neutral lipids, wherein the neutral lipid is selected from the group comprising distearoylphosphatidylcholine (DSPC), dioleoylphosphatidylcholine (DOPC), dipalmitoylphosphatidylcholine (DPPC), dioleoylphosphatidylglycerol (DOPG), dipalmitoylphosphatidylglycerol (DPPG), dioleoyl-phosphatidylethanolamine (DOPE), palmitoyloleoylphosphatidylcholine (POPC), palmitoyloleoyl-phosphatidylethanolamine (POPE) and dioleoyl-phosphatidylethanolamine 4-(N-maleimidomethyl)-cyclohexane-1carboxylate (DOPE-mal), dipalmitoyl phosphatidyl ethanolamine (DPPE), dimyristoylphosphoethanolamine (DMPE), distearoyl-phosphatidylethanolamine (DSPE), 16-O-monomethyl PE, 16-O-dimethyl PE, 18-1-trans PE, 1-stearioyl-2-oleoylphosphatidyethanol amine (SOPE), and 1,2-dielaidoyl-sn-glycero-3-phophoethanolamine (transDOPE), 1,2-diphytanoyl-sn-glycero-3-phosphoethanolamine (DPhyPE), or mixtures thereof.

[0448] In some embodiments, the neutral lipid of the lipid-based carriers (e.g. LNPs) of the pharmaceutical composition is selected or derived from 1,2-diheptanoyl-sn-glycero-3-phosphocholine (DHPC).

[0449] In other embodiments, the neutral lipid of the lipid-based carriers (e.g. LNPs) of the pharmaceutical composition is selected or derived from 1,2-diphytanoyl-sn-glycero-3-phosphoethanolamine (DPhyPE).

[0450] Accordingly, in some embodiments, the lipid-based carriers (e.g. LNPs) of the pharmaceutical composition comprise a neutral lipid selected or derived from DSPC, DHPC, or DPhyPE.

[0451] In some embodiments, the lipid-based carriers, for example the LNPs of the pharmaceutical composition comprise a neutral lipid selected or derived from 1,2-distearoyl-sn-glycero-3-phosphocholine (DSPC).

[0452] In various embodiments, the molar ratio of the cationic lipid to the neutral lipid in the lipid-based carriers ranges from about 2:1 to about 8:1.

[0453] The neutral lipid is for example from about 5 mol % to about 90 mol %, about 5 mol % to about 10 mol %, about 5, 10, 15, 20, 25, 30, 35, 40, 45, 50, 55, 60, 65, 70, 75, 80, 85, or about 90 mol % of the total lipid present in the lipid-based carrier. In one embodiment, the lipid-based carrier includes from about 0% to about 15% or 45% on a molar basis of neutral lipid, e.g. from about 3% to about 12% or from about 5% to about 10%. For instance, the lipid-based carrier may include about 15%, about 10%, about 7.5%, or about 7.1% of neutral lipid on a molar basis (based upon 100% total moles of lipid in the lipid-based carrier).

### Steroids, Steroid Analogues or Sterols:

[0454] In some embodiments, the lipid-based carriers of the pharmaceutical composition comprise a steroid, steroid analogue or sterol.

[0455] Suitably, the steroid, steroid analogue or sterol may be derived or selected from cholesterol, cholesteryl hemisuccinate (CHEMS) and a derivate thereof. In other embodiments, the lipid-based carriers of the pharmaceutical composition comprise a steroid, steroid analogue or sterol derived from a phytosterol (e.g., a sitosterol, such as beta-sitosterol), for example from a compound having the structure of Formula I as disclosed in claim 1 of WO2020061332; the disclosure of WO2020061332, especially the disclosure of Formula I and phytosterols being incorporated by reference herewith. In a further embodiment, the steroid is an imidazole cholesterol ester or “ICE” as disclosed in paragraphs [0320] and [0339]-[0340] of WO2019226925; WO2019226925 being incorporated herein by reference in its entirety.

[0456] In some embodiments, the lipid-based carriers of the pharmaceutical composition comprise a steroid, steroid analogue or sterol, which is selected or derived from cholesterol or comprise cholesterol.

[0457] The molar ratio of the cationic lipid to cholesterol in the lipid-based carriers may be in the range from about 2:1 to about 1:1. In some embodiments, the cholesterol may be PEGylated.

[0458] In some embodiments, the lipid-based carrier comprises about 10 mol % to about 60 mol % or about 25 mol % to about 40 mol % sterol (based on 100% total moles of lipids in the lipid-based carrier). In one embodiment, the sterol is about 10, 15, 20, 25, 30, 35, 40, 45, 50, 55, or about 60 mol % of the total lipid present in the lipid-based carrier. In another embodiment, the lipid-based carriers include from about 5% to about 50% on a molar basis of the sterol, e.g., about 15% to about 45%, about 20% to about 40%, about 48%, about 40%, about 38.5%, about 35%, about 34.4%, about 31.5% or about 30% on a molar basis (based upon 100% total moles of lipid in the lipid-based carrier). In some embodiments, the lipid-based carrier comprises about 28%, about 29% or about 30% sterol (based on 100% total moles of lipids in the lipid-based carrier). In some embodiments, the lipid-based carrier comprises about 40.9% sterol (based on 100% total moles of lipids in the lipid-based carrier).

[0459] References to other suitable cationic or ionizable, neutral, steroid/sterol or aggregation reducing lipids:

[0460] Other suitable cationic or ionizable, neutral, steroid/sterol or aggregation reducing lipids are disclosed in WO2010053572, WO2011068810, WO2012170889, WO2012170930, WO2013052523, WO2013090648, WO2013149140, WO2013149141, WO2013151663, WO2013151664, WO2013151665, WO2013151666, WO2013151667, WO2013151668, WO2013151669, WO2013151670, WO2013151671, WO2013151672, WO2013151736, WO2013185069, WO2014081507, WO2014089486, WO2014093924, WO2014144196, WO2014152211, WO2014152774, WO2014152940, WO2014159813, WO2014164253, WO2015061461, WO2015061467, WO2015061500, WO2015074085, WO2015105926, WO2015148247, WO2015164674, WO2015184256, WO2015199952, WO2015200465, WO2016004318, WO2016022914, WO2016036902, WO2016081029, WO2016118724, WO2016118725, WO2016176330, WO2017004143, WO2017019935, WO2017023817, WO2017031232, WO2017049074, WO2017049245, WO2017070601, WO2017070613, WO2017070616, WO2017070618, WO2017070620, WO2017070622, WO2017070623, WO2017070624, WO2017070626, WO2017075038, WO2017075531, WO2017099823, WO2017106799, WO2017112865, WO2017117528, WO2017117530, WO2017180917, WO2017201325, WO2017201340, WO2017201350, WO2017201352, WO2017218704, WO2017223135, WO2018013525, WO2018081480, WO2018081638, WO2018089540, WO2018089790, WO2018089801, WO2018089851, WO2018107026, WO2018118102, WO2018119163, WO2018157009, WO2018165257, WO2018170245, WO2018170306, WO2018170322, WO2018170336, WO2018183901, WO2018187590, WO2018191657, WO2018191719, WO2018200943, WO2018231709, WO2018231990, WO2018232120, WO2018232357, WO2019036000, WO2019036008, WO2019036028, WO2019036030, WO2019040590, WO2019089818, WO2019089828, WO2019140102, WO2019152557, WO2019152802, WO2019191780, WO2019222277, WO2019222424, WO2019226650, WO2019226925, WO2019232095, WO2019232097, WO2019232103, WO2019232208, WO2020061284, WO2020061295, WO2020061332, WO2020061367, WO2020081938, WO2020097376, WO2020097379, WO2020097384, WO2020102172, WO2020106903, WO2020146805, WO2020214946, WO2020219427, WO2020227085, WO2020232276, WO2020243540, WO2020257611, WO2020257716, WO2021007278, WO2021016430, WO2021022173, WO2021026358, WO2021030701, WO2021046260, WO2021050986, WO2021055833, WO2021055835, WO2021055849, WO2021127394, WO2021127641, WO2021202694, WO2021231697, WO2021231901, WO2008103276, WO2009086558, WO2009127060, WO2010048536, WO2010054406, WO2010080724, WO2010088537, WO2010129709, WO201021865, WO2011022460, WO2011043913, WO2011090965, WO2011149733, WO2011153120, WO2011153493, WO2012040184, WO2012044638, WO2012054365, WO2012061259, WO2013063468, WO2013086354, WO2013086373, U.S. Pat. No. 7,893,302B2, U.S. Pat. No. 7,404,969B2, U.S. Pat. No. 8,158,601B2, U.S. Pat. No. 8,283,333B2, U.S. Pat. No. 8,466,122B2, U.S. Pat. No. 8,569,256B2, US20100036115, US20110256175, US20120202871, US20120027803, US20120128760, US20130064894, US20130129785, US20130150625, US20130178541, US20130225836, and US20140039032; the disclosures specifically relating to cationic or ionizable, neutral, sterol or aggregation reducing lipids suitable for lipid-based carriers of the foregoing publications are incorporated herewith by reference.

[0461] For example, suitable cationic lipids or cationisable or ionizable lipids include, but are not limited to, DSDMA, N,N-dioleyl-N,N-dimethylammonium chloride (DODAC), N,N-distearyl-N,N-dimethylammonium bromide (DDAB), 1,2-dioleoyltrimethyl ammonium propane chloride (DOTAP) (also known as N-(2,3-dioleoyloxy)propyl)-N,N,N-trimethylammonium chloride and 1,2-Dioleyloxy-3-trimethylaminopropane chloride salt), N-(1-(2,3-dioleyloxy)propyl)-N,N,N-trimethylammonium chloride (DOTMA), N,N-dimethyl-2,3-dioleyloxy)propylamine (DODMA), ckk-E12 (WO2015200465), 1,2-DiLinoleyloxy-N,N-dimethylaminopropane (DLinDMA), 1,2-Dilinolenyloxy-N,N-dimethylaminopropane (DLenDMA), 1,2-di-γ-linolenyloxy-N,N-dimethylaminopropane (γ-DLenDMA), 98N12-5, 1,2-Dilinoleylcarbamoyloxy-3-dimethylaminopropane (DLin-C-DAP), ICE (Imidazol-based), HGT5000, HGT5001, DMDMA, CLinDMA, CpLinDMA, DMOBA, DOcarbDAP, DLincarbDAP, DLinCdAP, KLin-K-DMA, DLin-K-XTC2-DMA, XTC (2,2-Dilinoleyl-4-dimethylaminoethyl-[1,3]-dioxolane) HGT4003, 1,2-Dilinoleoyl-3-trimethylaminopropane chloride salt (DLin-TAP.Cl), 1,2-Dilinoleyloxo-3-(2-N,N-dimethylamino)ethoxypropane (DLin-EG-DM A), 2,2-Dilinoleyl-4-dimethylaminomethyl-[1,3]-dioxolane (DLin-K-DMA), (6Z,9Z,28Z,31Z)-heptatriaconta-6,9,28,31-tetraen-19-yl-4-(dimethylamino)butanoate (MC3, US20100324120), ALNY-100 ((3aR,5s,6aS)-N,N-dimethyl-2,2-di((9Z,12Z)-octadeca-9,12-dienyl)tetrahydro-3aH-cyclopenta[d][1,3]dioxol-5-amine)), NC98-5 (4,7,13-tris(3-oxo-3-(undecylamino)propyl)-N,N 16-diundecyl-4,7,10,13-tetraazahexadecane-1,16-diamide), (6Z,9Z,28Z,31Z)-heptatriaconta-6,9,28,31-tetraen-19-yl 4-(dimethylamino) butanoate (DLin-M-C3-DMA), 3-((6Z,9Z,28Z,31Z)-heptatriaconta-6,9,28,31-tetraen-19-yloxy)-N,N-dimethylpropan-1-amine (MC3 Ether), 4-((6Z,9Z,28Z,31Z)-heptatriaconta-6,9,28,31-tetraen-19-yloxy)-N,N-dimethylbutan-1-amine (MC4 Ether), LIPOFECTIN® (commercially available cationic liposomes comprising DOTMA and 1,2-dioleoyl-sn-3phosphoethanolamine (DOPE), from GIBCO/BRL, Grand Island, N.Y.); LIPOFECTAMINE® (commercially available cationic liposomes comprising N-(1-(2,3dioleyloxy)propyl)-N-(2-(sperminecarboxamido)ethyl)-N,N-dimethylammonium trifluoroacetate (DOSPA) and (DOPE), from GIBCO/BRL); and TRANSFECTAM® (commercially available cationic lipids comprising dioctadecylamidoglycyl carboxyspermine (DOGS) in ethanol from Promega Corp., Madison, Wis.) or any combination of any of the foregoing. Further suitable cationic or ionizable lipids include those described in international patent publications WO2010053572 (and particularly, 1,1′-(2-(4-(2-((2-(bis(2-hydroxydodecyl)amino)ethyl)(2-hydroxydodecyl)amino)ethyl)piperazin-1-yl)ethylazane-diyl)didodecan-2-ol (C12-200) described at paragraph [00225] of WO2010053572) and WO2012170930, both of which are incorporated herein by reference, HGT4003, HGT5000, HGTS001, HGT5001, HGT5002 (see US2015140070), 1,2-dilinoleyoxy-3-(dimethylamino)acetoxypropane (DLin-DAC), 1,2-dilinoleyoxy-3morpholinopropane (DLin-MA), 1,2-dilinoleoyl-3-dimethylaminopropane (DLinDAP), 1,2-dilinoleylthio-3-dimethylaminopropane (DLin-S-DMA), 1-linoleoyl-2-linoleyloxy-3dimethylaminopropane (DLin-2-DMAP), 1,2-dilinoleyloxy-3-trimethylaminopropane chloride salt (DLin-TMA.Cl), 1,2-dilinoleyloxy-3-(N-methylpiperazino)propane (DLin-MPZ), 3-(N,N-dilinoleylamino)-1,2-propanediol (DLinAP), 3-(N,N-dioleylamino)-1,2-propanediol (DOAP), 1,2-dilinoleyloxo-3-(2-N,N-dimethylamino)ethoxypropane (DLin-EG-DMA), 2,2-dilinoleyl-4-(2-dimethylaminoethyl)-[1,3]-dioxolane (DLin-KC2-DMA, WO2010042877); dilinoleyl-methyl-4-dimethylaminobutyrate (DLin-MC3-DMA).

### Lipid-Based Carrier Compositions:

[0462] In some embodiments, the lipid-based carriers of the pharmaceutical composition, for example the LNPs, comprise a coding RNA as defined in the first aspect, a cationic lipid as defined herein, an aggregation reducing lipid as defined herein, optionally, a neutral lipid as defined herein, and, optionally, a steroid or steroid analogue as defined herein.

[0463] In some embodiments, the lipid-based carriers comprising a coding RNA of the first aspect comprise
[0464] (i) at least one cationic lipid or ionizable lipid, for example as defined herein;
[0465] (ii) at least one neutral lipid or phospholipid, for example as defined herein;
[0466] (iii) at least one steroid or steroid analogue, for example as defined herein; and
[0467] (iv) at least one aggregation reducing lipid, for example as defined herein.

[0468] In some embodiments, the lipid-based carriers comprising a coding RNA of the first aspect comprise
[0469] (i) at least one cationic lipid selected or derived from ALC-0315, SM-102, SS-33/4PE-15, HEXA-C5DE-PipSS or compound C26 (see C26 in Table 1 of WO2021123332);
[0470] (ii) at least one neutral lipid selected or derived from DSPC, DHPC, or DPhyPE;
[0471] (iii) at least one steroid or steroid analogue selected or derived from cholesterol; and
[0472] (iv) at least one aggregation reducing lipid selected or derived from DMG-PEG 2000, C10-PEG2K, Cer8-PEG2K, or ALC-0159; and
[0473] wherein the lipid-based carriers encapsulate the RNA.

[0474] In some embodiments, the cationic lipids (as defined herein), neutral lipid (as defined herein), steroid or steroid analogue (as defined herein), and/or aggregation reducing lipid (as defined herein) may be combined at various relative ratios.

[0475] In some embodiments, the lipid-based carriers comprise (i) to (iv) in a molar ratio of about 20-60% cationic lipid or ionizable lipid, about 5-25% neutral lipid, about 25-55% steroid or steroid analogue, and about 0.5-15% aggregation reducing lipid e.g. polymer conjugated lipid, for example wherein the lipid-based carriers encapsulate the RNA.

[0476] For example, the ratio of cationic lipid or ionizable lipid to neutral lipid to steroid or steroid analogue to aggregation reducing lipid may be between about 30-60:20-35:20-30:1-15, or at a ratio of about 40:30:25:5, 50:25:20:5, 50:20:25:5, 50:27:20:3, 40:30:20:10, 40:32:20:8, 40:32:25:3 or 40:33:25:2, respectively.

[0477] In some embodiments, the lipid-based carriers, for example the LNPs comprising a coding RNA of the first aspect comprise
[0478] (i) at least one cationic lipid selected from SM-102;
[0479] (ii) at least one neutral lipid selected from DSPC;
[0480] (iii) at least one steroid or steroid analogue selected from cholesterol; and
[0481] (iv) at least one aggregation reducing lipid selected from DMG-PEG 2000; and
[0482] wherein the lipid-based carriers encapsulate the RNA, for example wherein i) to (iv) are n a weight ratio of about 50% cationic lipid, about 10% neutral lipid, about 38.5% steroid or steroid analogue, and about 1.5% aggregation reducing lipid,
[0483] for example wherein the lipid-based carriers encapsulate the RNA.

[0484] In some embodiments, the lipid-based carriers, for example the LNPs comprising a coding RNA of the first aspect comprise
[0485] (i) at least one cationic lipid selected from SM-102;
[0486] (ii) at least one neutral lipid selected from DSPC;
[0487] (iii) at least one steroid or steroid analogue selected from cholesterol; and
[0488] (iv) at least one aggregation reducing lipid selected from DMG-PEG 2000; and
[0489] wherein the lipid-based carriers encapsulate the RNA, for example wherein i) to (iv) are n a weight ratio of about 48.5% cationic lipid, about 11.1% neutral lipid, about 38.9% steroid or steroid analogue, and about 1.5% aggregation reducing lipid,
[0490] for example wherein the lipid-based carriers encapsulate the RNA. A suitable N/P ratio for this formulation is about 4.85 (lipid to RNA mol ratio).

[0491] In some embodiments, the lipid-based carriers, for example the LNPs comprising a coding RNA of the first aspect comprise
[0492] (i) at least one cationic lipid selected from SS-33/4PE-15, HEXA-C5DE-PipSS or or compound C26 (see C26 in Table 1 of WO2021123332);
[0493] (ii) at least one neutral lipid selected from DPhyPE;
[0494] (iii) at least one steroid or steroid analogue selected from cholesterol; and
[0495] (iv) at least one aggregation reducing lipid selected from DMG-PEG 2000; and
[0496] wherein the lipid-based carriers encapsulate the RNA. Such LNPs are herein referred to as GN-LNPs.

[0497] In one embodiment, the lipid-based carriers, for example the LNPs comprising a coding RNA of the first aspect comprise
[0498] (i) at least one cationic lipid selected from ALC-0315;
[0499] (ii) at least one neutral lipid selected from DSPC;
[0500] (iii) at least one steroid or steroid analogue selected from cholesterol; and
[0501] (iv) at least one aggregation reducing lipid selected from ALC-0159.

[0502] In one embodiment, the lipid-based carriers, preferably the LNPs comprising a coding RNA of the first aspect comprise
[0503] (i) at least one cationic lipid selected from ALC-0315;
[0504] (ii) at least one neutral lipid selected from DSPC;
[0505] (iii) at least one steroid or steroid analogue selected from cholesterol; and
[0506] (iv) at least one aggregation reducing lipid selected from ALC-0159; and
[0507] wherein the lipid-based carriers encapsulate the RNA, for example wherein i) to (iv) are in a molar ratio of about 47.4% cationic lipid, about 10% neutral lipid, about 40.9% steroid or steroid analogue, and about 1.7% aggregation reducing lipid, for example wherein the lipid-based carriers encapsulate the RNA. Such LNPs are herein referred to as 315-LNPs.

[0508] In some embodiments, the pharmaceutical composition comprises lipid nanoparticles (LNPs) which have a molar ratio of approximately 50:10:38.5:1.5, for example 47.5:10:40.8:1.7 or for example 47.4:10:40.9:1.7 (i.e. proportion (mol %) of cationic lipid (for example above mentioned lipid 111-3 (ALC-0315)), DSPC, cholesterol and PEG-lipid (for example above mentioned PEG-lipid of formula (IVa) with n=49, for example above mentioned PEG-lipid of formula (IVa) with n=45 (ALC-0159)); solubilized in ethanol).

[0509] In one embodiment, the lipid-based carriers, for example the LNPs comprising a coding RNA of the first aspect comprise
[0510] (i) at least one cationic lipid selected from ALC-0315;
[0511] (ii) at least one neutral lipid selected from DSPC;
[0512] (iii) at least one steroid or steroid analogue selected from cholesterol; and
[0513] (iv) at least one aggregation reducing lipid selected from ALC-0159; and
[0514] wherein the lipid-based carriers encapsulate the RNA, for example wherein i) to (iv) are in a molar ratio of about 47.4% cationic lipid, about 10% neutral lipid, about 40.9% steroid or steroid analogue, and about 1.7% aggregation reducing lipid, for example wherein the lipid-based carriers encapsulate the RNA, wherein the RNA comprises or consists of an RNA sequence identical or at least 70%, 80%, 90%, 91%, 92%, 93%, 94%, 95%, 96%, 97%, 98%, or 99% identical to any one of SEQ ID NOs: 673-695, 698-720, 723-745, 748-770, 773-795, 798-820, 823-845, 848-870, 873-895, 898-920, 923-945, 948-970, 973-995, 998-1020, 1023-1045, 1048-1070, 1073-1095, 1098-1120, 1123-1145, 1148-1170, 1173-1195, 1198-1220, 1223-1245, 1248-1270, or a fragment or a variant thereof. In such embodiments, the RNA is for example an mRNA that comprises a cap1 structure and an RNA sequence that is not chemically modified (e.g. consisting of non-modified ribonucleotides).

[0515] mRNA sequences in that context are for example SEQ ID NOs: 829, 679, or a fragment or a variant of any of these. Other mRNA sequences in that context are SEQ ID NOs: 834, 684, or a fragment or a variant of any of these. Other mRNA sequences in that context are SEQ ID NOs: 833, 683, or a fragment or a variant of any of these.

[0516] In some embodiments, the lipid-based carriers, for example the LNPs comprising a coding RNA of the first aspect comprise
[0517] (i) at least one cationic lipid selected from ALC-0315;
[0518] (ii) at least one neutral lipid selected from DSPC;
[0519] (iii) at least one steroid or steroid analogue selected from cholesterol; and
[0520] (iv) at least one aggregation reducing lipid selected from ALC-0159; and
[0521] wherein the lipid-based carriers encapsulate the RNA, for example wherein i) to (iv) are in a molar ratio of about 47.4% cationic lipid, about 10% neutral lipid, about 40.9% steroid or steroid analogue, and about 1.7% aggregation reducing lipid, for example wherein the lipid-based carriers encapsulate the RNA, wherein the RNA comprises or consists of an RNA sequence identical or at least 70%, 80%, 90%, 91%, 92%, 93%, 94%, 95%, 96%, 97%, 98%, or 99% identical to any one of SEQ ID NOs: 673-695, 698-720, 723-745, 748-770, 773-795, 798-820, 823-845, 848-870, 873-895, 898-920, 923-945, 948-970, 973-995, 998-1020, 1023-1045, 1048-1070, 1073-1095, 1098-1120, 1123-1145, 1148-1170, 1173-1195, 1198-1220, 1223-1245, 1248-1270, 1271-1276 or a fragment or a variant thereof. In such embodiments, the RNA is for example an mRNA that comprises a cap1 structure and an RNA sequence wherein all uracils are substituted by pseudouridine (ψ) or N1-methylpseudouridine (m1ψ).

[0522] mRNA sequences in that context are for example SEQ ID NOs: 829, 679, 1271, 1274 or a fragment or a variant of any of these. Other mRNA sequences in that context are SEQ ID NOs: 834, 684, 1273, 1276 or a fragment or a variant of any of these. Other mRNA sequences in that context are SEQ ID NOs: 833, 683, 1272, 1275 or a fragment or a variant thereof.

[0523] In some embodiments, the wt/wt ratio of lipid to RNA in the lipid-based carrier is from about 10:1 to about 60:1, e.g. about 40:1. In some embodiments, the wt/wt ratio of lipid to RNA is from about 20:1 to about 30:1, e.g. about 25:1. In other embodiments, the wt/wt ratio of lipid to RNA is in the range of 20 to 60, for example from about 3 to about 15, about 5 to about 13, about 4 to about 8 or from about 7 to about 11.

[0524] The amount of lipid comprised in the lipid-based carriers may be selected taking the amount of the RNA cargo into account. In one embodiment, these amounts are selected such as to result in an N/P ratio of the lipid-based carriers encapsulating the RNA in the range of about 0.1 to about 20. The N/P ratio is defined as the mole ratio of the nitrogen atoms (“N”) of the basic nitrogen-containing groups of the lipid to the phosphate groups (“P”) of the RNA which is used as cargo. The N/P ratio may be calculated on the basis that, for example, 1 μg RNA typically contains about 3 nmol phosphate residues, provided that the RNA exhibits a statistical distribution of bases. The “N”-value of the lipid or lipidoid may be calculated on the basis of its molecular weight and the relative content of permanently cationic and—if present—cationisable groups.

[0525] In embodiments, the N/P ratio can be in the range of about 1 to about 50. In other embodiments, the range is from about 1 to about 20, and for example about 1 to about 15, from about 1 to about 10, or from about 5 to about 7. For “GN-LNPs”, a suitable N/P (lipid to RNA mol ratio) is about 14 or about 17. For “315-LNPs”, a suitable N/P (lipid to RNA mol ratio) is about 6. Another suitable N/P ratio is about 4.85 or 5 (lipid to RNA mol ratio).

[0526] In various embodiments, the pharmaceutical composition comprises lipid-based carriers (encapsulating RNA) that have a defined size (particle size, homogeneous size distribution).

[0527] The size of the lipid-based carriers of the pharmaceutical composition is typically described herein as Z-average size. The terms “average diameter”, “mean diameter”, “diameter” or “size” for particles (e.g. lipid-based carrier) are used synonymously with the value of the Z-average. The term “Z-average size” refers to the mean diameter of particles as measured by dynamic light scattering (DLS) with data analysis using the so-called cumulant algorithm, which provides as results the so-called Z-average with the dimension of a length, and the polydispersity index (PI), which is dimensionless (Koppel, D., J. Chem. Phys. 57, 1972, pp 4814-4820, ISO 13321).

[0528] The term “dynamic light scattering” or “DLS” refers to a method for analyzing particles in a liquid, wherein the liquid is typically illuminated with a monochromatic light source and wherein the light scattered by particles in the liquid is detected. DLS can thus be used to measure particle sizes in a liquid. Suitable DLS protocols are known in the art. DLS instruments are commercially available (such as the Zetasizer Nano Series, Malvern Instruments, Worcestershire, UK). DLS instruments employ either a detector at 90° (e.g. DynaPro® NanoStar® from Wyatt Technology or Zetasizer Nano S90® from Malvern Instruments) or a backscatter detection system at 173° (e.g., Zetasizer Nano S® from Malvern Instruments) and at 158° (DynaPro Plate Reader® from Malvern Instruments) close to the incident light of 180°. Typically, DLS measurements are performed at a temperature of about 25° C. DLS is also used in the context of the present disclosure to determine the polydispersity index (PDI) and/or the main peak diameter of the lipid-based carriers incorporating RNA.

[0529] In various embodiments, the lipid-based carriers of the pharmaceutical composition encapsulating RNA have a Z-average size ranging from about 50 nm to about 200 nm, from about 50 nm to about 190 nm, from about 50 nm to about 180 nm, from about 50 nm to about 170 nm, from about 50 nm to about 160 nm, 50 nm to about 150 nm, 50 nm to about 140 nm, 50 nm to about 130 nm, 50 nm to about 120 nm, 50 nm to about 110 nm, 50 nm to about 100 nm, 50 nm to about 90 nm, 50 nm to about 80 nm, 50 nm to about 70 nm, 50 nm to about 60 nm, 60 nm to about 200 nm, from about 60 nm to about 190 nm, from about 60 nm to about 180 nm, from about 60 nm to about 170 nm, from about 60 nm to about 160 nm, 60 nm to about 150 nm, 60 nm to about 140 nm, 60 nm to about 130 nm, 60 nm to about 120 nm, 60 nm to about 110 nm, 60 nm to about 100 nm, 60 nm to about 90 nm, 60 nm to about 80 nm, or 60 nm to about 70 nm, for example about 50 nm, 55 nm, 60 nm, 65 nm, 70 nm, 75 nm, 80 nm, 85 nm, 90 nm, 95 nm, 100 nm, 105 nm, 110 nm, 115 nm, 120 nm, 125 nm, 130 nm, 135 nm, 140 nm, 145 nm, 150 nm, 160 nm, 170 nm, 180 nm, 190 nm, or 200 nm.

[0530] In one embodiment, the lipid-based carriers of the pharmaceutical composition encapsulating RNA have a Z-average size ranging from about 50 nm to about 200 nm, for example in a range from about 50 nm to about 150 nm, for example from about 50 nm to about 120 nm.

[0531] Suitably, the pharmaceutical composition comprises less than about 10%, 9%, 8%, 7%, 6%, 5%, 4%, 3%, 2%, 1% lipid-based carriers that have a particle size exceeding about 500 nm.

[0532] Suitably, the pharmaceutical composition comprises less than about 10%, 9%, 8%, 7%, 6%, 5%, 4%, 3%, 2%, 1% LNPs that have a particle size smaller than about 20 nm.

[0533] Suitably, at least about 80%, 85%, 90%, 95% of lipid-based carriers of the composition have a spherical morphology.

[0534] In embodiments, the polydispersity index (PDI) of the lipid-based carriers is typically in the range of 0.1 to 0.5. In a particular embodiment, a PDI is below 0.2. Typically, the PDI is determined by dynamic light scattering.

[0535] In some embodiments, 80% of RNA comprised in the pharmaceutical composition is encapsulated in lipid based carriers, for example 85% of the RNA comprised in the pharmaceutical composition is encapsulated in lipid based carriers, for example 90% of the RNA comprised in the pharmaceutical composition is encapsulated in lipid based carriers, for example 95% of the RNA comprised in the pharmaceutical composition is encapsulated in lipid based carriers. The percentage of encapsulation may be determined by a RiboGreen assay as known in the art.

[0536] According to some embodiments the lipid-based carriers for example encapsulating or comprising RNA have been purified by at least one purification step, for example by at least one step of TFF and/or at least one step of clarification and/or at least one step of filtration.

### Antagonists of RNA Sensing Pattern Recognition Receptors:

[0537] In some embodiments, the pharmaceutical composition comprises at least one antagonist of at least one RNA sensing pattern recognition receptor. Such an antagonist may for example be co-formulated in lipid-based carriers as defined herein.

[0538] Suitable antagonist of at least one RNA sensing pattern recognition receptor are disclosed in published PCT patent application WO2021028439, the full disclosure herewith incorporated by reference. In particular, the disclosure relating to suitable antagonist of at least one RNA sensing pattern recognition receptors as defined in any one of the claims 1 to 94 of WO2021028439 are incorporated by reference.

[0539] In some embodiments in that context, the pharmaceutical composition comprises at least one antagonist of at least one RNA sensing pattern recognition receptor selected from a Toll-like receptor, for example TLR7 and/or TLR8.

[0540] In embodiments in that context, the at least one antagonist of at least one RNA sensing pattern recognition receptor is selected from a nucleotide, a nucleotide analogue, a nucleic acid, a peptide, a protein, a small molecule, a lipid, or a fragment, variant or derivative of any of these.

[0541] In some embodiments in that context, the at least one antagonist of at least one RNA sensing pattern recognition receptor is a single stranded oligonucleotide, for example a single stranded RNA Oligonucleotide.

[0542] In embodiments in that context, the at least one antagonist of at least one RNA sensing pattern recognition receptor is a single stranded oligonucleotide that comprises or consists of a nucleic acid sequence identical or at least 70%, 80%, 85%, 86%, 87%, 88%, 89%, 90%, 91%, 92%, 93%, 94%, 95%, 96%, 97%, 98%, or 99% identical to a nucleic acid sequence selected from the group consisting of SEQ ID NOs: 85-212 of WO2021028439, or fragments of any of these sequences.

[0543] In some embodiments in that context, the antagonist of at least one RNA sensing pattern recognition receptor is a single stranded oligonucleotide that comprises or consists of a nucleic acid sequence identical or at least 70%, 80%, 85%, 86%, 87%, 88%, 89%, 90%, 91%, 92%, 93%, 94%, 95%, 96%, 97%, 98%, or 99% identical to a nucleic acid sequence selected from the group consisting of SEQ ID NOs: 85-87, 149-212 of WO2021028439, or fragments of any of these sequences.

[0544] A suitable antagonist of at least one RNA sensing pattern recognition receptor in the context of the disclosure is 5′-GAG CGmG CCA-3′ (SEQ ID NO: 85 of WO2021028439), or a fragment thereof.

[0545] In some embodiments in that context, the molar ratio of the at least one antagonist of at least one RNA sensing pattern recognition receptor as defined herein to the at least one RNA encoding an antigenic peptide or protein as defined herein suitably ranges from about 1:1, to about 100:1, or ranges from about 20:1, to about 80:1.

[0546] In some embodiments in that context, the weight to weight ratio of the at least one antagonist of at least one RNA sensing pattern recognition receptor as defined herein to the at least one RNA encoding an antigenic peptide or protein as defined herein suitably ranges from about 1:1, to about 1:30, or ranges from about 1:2, to about 1:10.

[0547] In embodiments in that context, the at least one antagonist of at least one RNA sensing pattern recognition receptor as defined herein and the at least one RNA encoding an antigenic peptide or protein as defined herein are separately formulated, for example separately formulated in lipid-based carriers as defined herein.

[0548] In some embodiments in that context, the at least one antagonist of at least one RNA sensing pattern recognition receptor as defined herein and the at least one RNA encoding an antigenic peptide or protein as defined herein are co-formulated, for example co-formulated in lipid-based carriers as defined herein.

[0549] In embodiments of composition comprising at least one antagonist of at least one RNA sensing pattern recognition receptor, the at least one RNA encoding an antigenic peptide or protein as defined herein does for example not comprise chemically modified nucleotides (e.g. pseudouridine (ψ) or N1-methylpseudouridine (m1ψ)) as defined herein.

### Presentation:

[0550] In some embodiments, the pharmaceutical composition is lyophilized, spray-dried or spray-freeze dried.

[0551] Accordingly, the pharmaceutical composition is lyophilized (e.g. according to WO2016165831 or WO2011069586) to yield a temperature stable composition. The pharmaceutical composition may also be dried using spray-drying or spray-freeze drying (e.g. according to WO2016184575 or WO2016184576) to yield a temperature stable composition (powder) as defined herein.

[0552] Lyoprotectants for lyophilization and or spray drying may be selected from trehalose, sucrose, mannose, dextran and inulin. A suitable lyoprotectant is sucrose, optionally comprising a further lyoprotectant. A further suitable lyoprotectant is trehalose, optionally comprising a further lyoprotectant. Accordingly, the pharmaceutical composition may comprise at least one lyoprotectant.

[0553] In some embodiments, the pharmaceutical composition is a liquid composition or dried composition, such as a lyophilized/spry-dried composition which can be reconstituted in a liquid carrier.

[0554] In some embodiments, the pharmaceutical composition (or the liquid carrier) comprises a sugar in a concentration of about 50 mM to about 300 mM, for example sucrose in a concentration of about 150 mM.

[0555] In some embodiments, the pharmaceutical composition (or the liquid carrier) comprises a salt in a concentration of about 10 mM to about 200 mM, for example NaCl in a concentration of about 75 mM.

[0556] In some embodiments, the pharmaceutical composition (or the liquid carrier) comprises a buffering agent in a concentration 1 mM to about 100 mM, for example Na₂HPO₄, Na₃PO₄ or Tris (Trometamol). In other embodiments, the pharmaceutical composition (or the liquid carrier) comprises about 2.4 mM Tris (Trometamol), about 1.4 mM glacial acetic acid, about 3.9 mM acetic acid and about 254 mM sugar.

[0557] In some embodiments, the pharmaceutical composition (or the liquid carrier) has a pH in a range of about pH 7.0 to about pH 8.0, for example of about pH 7.4.

3: Vaccine Comprising a Coding RNA Encoding an Antigenic Polypeptide which is or is Derived from E. coli FimH

[0558] In a third aspect, it is provided a vaccine against E. coli.

[0559] Notably, embodiments relating to the composition of the second aspect may likewise be read on and be understood as suitable embodiments of the vaccine of the third aspect. Also, embodiments relating to the vaccine of the third aspect may likewise be read on and be understood as suitable embodiments of the composition of the second aspect. Furthermore, features and embodiments described in the context of the first aspect (the coding RNA of the disclosure) have to be read on and have to be understood as suitable embodiments of the vaccine of the third aspect.

[0560] In some embodiments, the vaccine comprises a coding RNA of the first aspect, or at least one composition of the second aspect.

[0561] The term “vaccine” will be recognized and understood by the person of ordinary skill in the art, and is for example intended to be a prophylactic or therapeutic material providing at least one epitope or antigen, for example an immunogen. In the context of the disclosure the antigen or antigenic function is suitably provided by the RNA of the first aspect (said coding RNA comprising a coding sequence encoding an antigenic polypeptide which is selected or derived from E. coli FimH) or the composition of the second aspect (comprising a coding RNA of the first aspect).

[0562] In some embodiments, the vaccine elicits an adaptive immune response, for example a protective adaptive immune response against E. coli. Particularly, the E. coli is selected from the group consisting of: E. coli J96, E. coli 536, E. coli CFT073, E. coli UMN026, E. coli CLONE D i14, E. coli CLONE D i2, E. coli IA139, E. coli NA114, E. coli IHE3034, E. coli 789, E. coli F11 and E. coli UTI89.

[0563] In some embodiments, the vaccine, for example the administration of the vaccine to a subject, elicits a humoral immune response against E. coli. In one embodiment, said humoral immune response is against E. coli FimH. In one embodiment, the vaccine, for example the administration of the vaccine to a subject, elicits a humoral immune response against E. coli, for example against E. coli FimH, in the urine of a subject upon administration of the vaccine.

[0564] In one embodiment, the vaccine, for example the administration of the vaccine to a subject, elicits neutralizing antibody titers against E. coli. In one embodiment, said antibodies are IgG antibodies. In one embodiment, said antibodies are against E. coli FimH. In one embodiment, the vaccine, for example the administration of the vaccine to a subject, elicits neutralizing antibody titers against E. coli, for example against E. coli FimH, in the urine of a subject upon administration of the vaccine.

[0565] In one embodiment, the vaccine of the disclosure elicits antibodies which are capable of inhibiting bacterial adhesion to uroepithelial cells. Suitable methods for measuring inhibition of bacterial adhesion are described herein and in the Examples.

[0566] Methods for measuring bacterial adhesion are known in the art. Suitably, the method described in Thomas W E, et al. Cell. 2002 Jun. 28; 109(7):913-23, which is incorporated by reference herein; or Hartmann M, et al. FEBS Lett. 2012 May 21; 586(10):1459-65, which is incorporated by reference herein; or Falk P, et sl. Methods Cell Biol. 1994; 45:165-92, which is incorporated by reference herein; or Garcia Mendez K B, et al. Int J Exp Pathol. 2016 April; 97(2):194-201, which is incorporated by reference herein, may be used. In one embodiment, bacterial adhesion is (in brief) measured with the BAI assay as follows and as described in the Examples: UPEC strains engineered to express the mCherry fluorescent marker, are incubated for 30 minutes with monolayers of SV-HUC-1 (ATTCC) in 96 well plates in the presence of specific sera against FimH derivatives or positive/negative controls. After adhesion, cells are washed extensively to remove unbound bacteria and fixed with formaldehyde. Finally, the specific fluorescent signal associated with the adhered bacteria is recorded by the use of an automated high content screening microscope (Opera Phenix) and quantified with the Harmony software.

[0567] In some embodiments, the immune response is effective to prevent or treat one or more symptoms associated with UTI in the subject in need thereof. In certain embodiments, the immune response is effective to prevent or reduce a symptom of UTI, for example in at least 30%, for example at least 40%, such as at least 50%, of the subjects administered with the vaccine. Symptoms of UTI can vary depending on the nature of the infection and can include, but are not limited to: dysuria, increased urinary frequency or urgency, pyuria, hematuria, back pain, pelvic pain, pain while urinating, fever, chills, and/or nausea.

[0568] In certain embodiments, the immune response is effective to prevent or reduce organ failure resulting from a UTI. In certain embodiments, the immune response is effective to reduce the likelihood of hospitalization of a subject suffering from a UTI. In some embodiments, the immune response effective to reduce the duration of hospitalization of a subject suffering from a UTI.

[0569] The vaccine may be used according to the disclosure for human medical purposes and also for veterinary medical purposes (mammals, vertebrates, or avian species).

[0570] Suitable administration routes for the vaccine comprise intranasal, oral, sublingual, intravenous, intramuscular, intradermal, transdermal, or subcutaneous. Accordingly, in some embodiments, the vaccine is suitable for intranasal, oral, sublingual, intravenous, intramuscular, intradermal, transdermal, or subcutaneous administration.

[0571] In one embodiment, the vaccine is suitable for intramuscular administration.

[0572] In one embodiment, the vaccine comprises lipid-based carriers comprising
[0573] (i) at least one cationic lipid selected from ALC-0315;
[0574] (ii) at least one neutral lipid selected from DSPC;
[0575] (iii) at least one steroid or steroid analogue selected from cholesterol; and
[0576] (iv) at least one aggregation reducing lipid selected from ALC-0159; and wherein the lipid-based carriers encapsulate the RNA of the disclosure, for example wherein i) to
[0577] (iv) are in a molar ratio of about 47.4% cationic lipid, about 10% neutral lipid, about 40.9% steroid or steroid analogue, and about 1.7% aggregation reducing lipid, wherein the RNA comprises or consists of an RNA sequence identical or at least 70%, 80%, 90%, 91%, 92%, 93%, 94%, 95%, 96%, 97%, 98%, or 99% identical to any one of SEQ ID NOs: 673-695, 698-720, 723-745, 748-770, 773-795, 798-820, 823-845, 848-870, 873-895, 898-920, 923-945, 948-970, 973-995, 998-1020, 1023-1045, 1048-1070, 1073-1095, 1098-1120, 1123-1145, 1148-1170, 1173-1195, 1198-1220, 1223-1245, 1248-1270, or a fragment or a variant thereof. In such embodiments, the RNA is for example an mRNA that comprises a cap1 structure and the RNA sequence is not chemically modified (e.g. consisting of non-modified ribonucleotides). mRNA sequences in that context are for example SEQ ID NOs: 829, 679, or a fragment or a variant of any of these. Other mRNA sequences in that context are SEQ ID NOs: 834 684, or a fragment or a variant of any of these. Other mRNA sequences in that context are SEQ ID NOs: 833, 683, or a fragment or a variant of any of these.

[0578] In one embodiment, the vaccine comprises lipid-based carriers comprising
[0579] (i) at least one cationic lipid selected from ALC-0315;
[0580] (ii) at least one neutral lipid selected from DSPC;
[0581] (iii) at least one steroid or steroid analogue selected from cholesterol; and
[0582] (iv) at least one aggregation reducing lipid selected from ALC-0159; and
[0583] wherein the lipid-based carriers encapsulate the RNA of the disclosure, for example wherein i) to (iv) are in a molar ratio of about 47.4% cationic lipid, about 10% neutral lipid, about 40.9% steroid or steroid analogue, and about 1.7% aggregation reducing lipid, wherein the RNA comprises or consists an RNA sequence identical or at least 70%, 80%, 90%, 91%, 92%, 93%, 94%, 95%, 96%, 97%, 98%, or 99% identical to any one of SEQ ID NOs: 673-695, 698-720, 723-745, 748-770, 773-795, 798-820, 823-845, 848-870, 873-895, 898-920, 923-945, 948-970, 973-995, 998-1020, 1023-1045, 1048-1070, 1073-1095, 1098-1120, 1123-1145, 1148-1170, 1173-1195, 1198-1220, 1223-1245, 1248-1270, 1274-1276 or a fragment or a variant thereof. In such embodiments, the RNA is for example an mRNA that comprises a cap1 structure and the uracils of the RNA sequence are substituted by pseudouridine (ψ). mRNA sequences in that context are for example SEQ ID NOs: 829, 679, 1274 or a fragment or a variant of any of these. Other mRNA sequences in that context are SEQ ID NOs: 834 684, 1276 or a fragment or a variant thereof. Other mRNA sequences in that context are SEQ ID NOs: 833, 683, 1275 or a fragment or a variant of any of these.

[0584] In one embodiment, the vaccine comprises lipid-based carriers comprising
[0585] (i) at least one cationic lipid selected from ALC-0315;
[0586] (ii) at least one neutral lipid selected from DSPC;
[0587] (iii) at least one steroid or steroid analogue selected from cholesterol; and
[0588] (iv) at least one aggregation reducing lipid selected from ALC-0159; and
[0589] wherein the lipid-based carriers encapsulate the RNA of the disclosure, for example wherein i) to (iv) are in a molar ratio of about 47.4% cationic lipid, about 10% neutral lipid, about 40.9% steroid or steroid analogue, and about 1.7% aggregation reducing lipid, wherein the RNA comprises or consists an RNA sequence identical or at least 70%, 80%, 90%, 91%, 92%, 93%, 94%, 95%, 96%, 97%, 98%, or 99% identical to any one of SEQ ID NOs: 673-695, 698-720, 723-745, 748-770, 773-795, 798-820, 823-845, 848-870, 873-895, 898-920, 923-945, 948-970, 973-995, 998-1020, 1023-1045, 1048-1070, 1073-1095, 1098-1120, 1123-1145, 1148-1170, 1173-1195, 1198-1220, 1223-1245, 1248-1270, 1271-1273 or a fragment or a variant thereof. In such embodiments, the RNA is for example an mRNA that comprises a cap1 structure and the uracils of the RNA sequence are substituted by N1-methylpseudouridine (m1ψ). mRNA sequences in that context are for example SEQ ID NOs: 829, 679, 1271 or a fragment or a variant of any of these. Other mRNA sequences in that context are SEQ ID NOs: 834 684, 1273 or a fragment or a variant of any of these. Other mRNA sequences in that context are SEQ ID NOs: 833, 683, 1272 or a fragment or a variant of any of these.

### 4: A Kit or Kit of Parts

[0590] In a fourth aspect, it is provided a kit or kit of parts suitable for treating or preventing an infection caused by Escherichia coli. Notably, embodiments relating to the RNA of the first aspect may likewise be read on and be understood as suitable embodiments of the kit or kit of parts of the fourth aspect. Also, embodiments relating to the pharmaceutical composition of the second aspect or the vaccine of the third aspect may likewise be read on and be understood as suitable embodiments of the kit or kit of parts of the fourth aspect,

[0591] In some embodiments, the kit or kit of parts comprises at least one coding RNA of the first aspect, at least one composition of the second aspect, and/or at least one vaccine of the third aspect.

[0592] In addition, the kit or kit of parts may comprise a liquid vehicle for solubilising, and/or technical instructions providing information on administration and dosage of the components.

[0593] The kit may further comprise additional components as described in the context of the composition of the second aspect, and/or the vaccine of the third aspect.

[0594] The technical instructions of said kit may contain information about administration and dosage and patient groups. Such kits, for example kits of parts, may be applied e.g. for any of the applications or uses mentioned herein, for example for the use of the RNA of the first aspect, the composition of the second aspect, the vaccine of the third aspect, for the treatment or prophylaxis of an infection or diseases caused by an Escherichia coli, or disorders related thereto.

[0595] Suitably, the coding RNA, the composition, or the vaccine is provided in a separate part of the kit.

[0596] In some embodiments, the coding RNA, the composition, or the vaccine is lyophilised or spray(freeze)dried.

[0597] In embodiments where the pharmaceutical composition is provided as a lyophilized or spray-freeze dried or spray dried composition, the kit or kit of parts may suitably comprise a buffer for re-constitution of lyophilized or spray-freeze dried or spray dried composition.

[0598] Accordingly, the kit or kit of parts may additionally comprise a buffer for re-constitution and/or dilution of the RNA, the composition, or the vaccine.

[0599] In some embodiments, the buffer for re-constitution and/or dilution is a sterile buffer. In some embodiments, the buffer comprises a salt, for example NaCl, optionally in a concentration of about 0.9%. Such a buffer may optionally comprise a preservative.

[0600] In some embodiments, the kit or kit of parts as defined herein comprises at least one syringe.

[0601] In some embodiments, the kit or kit of parts comprises the following components:
[0602] a) at least one container or vial comprising a composition or a vaccine as defined herein.
[0603] b) optionally, at least one dilution container or vial comprising a sterile dilution buffer, suitably a buffer comprising NaCl, optionally comprising a preservative;
[0604] c) optionally, at least one means for transferring the composition or vaccine from the container to the dilution container; and
[0605] d) at least one syringe for administering the composition or vaccine to a subject, for example a syringe configured for intramuscular administration to a human subject.

### 5: Medical Uses

[0606] In a further aspect, it is provided a medical use of the coding RNA as defined herein, the composition as defined herein, the vaccine as defined herein, or the kit or kit of parts as defined herein.

[0607] Notably, embodiments relating to the previous aspects may likewise be read on and be understood as suitable embodiments of medical uses of the invention (and vice versa).

[0608] Accordingly, it is provided the coding RNA of the disclosure, and/or the composition of the disclosure, and/or the vaccine of the disclosure, and/or the kit or kit of parts of the disclosure for use as a medicament

[0609] In a further aspect, second medical uses of the coding RNA as defined herein, the composition as defined herein, the vaccine as defined herein, or the kit or kit of parts as defined herein are provided.

[0610] Accordingly, it is provided the coding RNA of the disclosure, and/or the composition of the disclosure, and/or the vaccine of the disclosure, and/or the kit or kit of parts of the disclosure for use in treating or preventing a disease caused by E. coli. Particularly, the E. coli is selected from the group consisting of: E. coli J96, E. coli 536, E. coli CFT073, E. coli UMN026, E. coli CLONE D i14, E. coli CLONE D i2, E. coli IA139, E. coli NA114, E. coli IHE3034, E. coli 789, E. coli F11 and E. coli UTI89.

[0611] In some embodiments, it is provided the coding RNA of the disclosure, and/or the composition of the disclosure, and/or the vaccine of the disclosure, and/or the kit or kit of parts of the disclosure for use in treating or preventing one or more symptoms associated with UTI in the subject in need thereof. In certain embodiments, the use is for treating or preventing a symptom of UTI, for example in at least 30%, for example at least 40%, such as at least 50%, of the subjects administered with the vaccine. Symptoms of UTI can vary depending on the nature of the infection and can include, but are not limited to: dysuria, increased urinary frequency or urgency, pyuria, hematuria, back pain, pelvic pain, pain while urinating, fever, chills, and/or nausea.

[0612] In certain embodiments, the use is for preventing or reducing organ failure resulting from a UTI. In certain embodiments, the use is for reducing the likelihood of hospitalization of a subject suffering from a UTI. In some embodiments, the use is for reducing the duration of hospitalization of a subject suffering from a UTI.

[0613] In the context of a medical use, the coding RNA of the disclosure, and/or the composition of the disclosure, and/or the vaccine of the disclosure, and/or the kit or kit of parts of the disclosure may for example be administered locally.

[0614] In that context, administration may be by an intranasal, oral, sublingual, intravenous, intramuscular, intradermal, transdermal, or subcutaneous, for example intramuscular.

[0615] In one embodiment, administration may be by a conventional needle injection, e.g. an intramuscular injection.

[0616] In some embodiments, the use may be for human medical purposes and also for veterinary medical purposes. In one embodiment, the use may for human medical purposes.

[0617] In some embodiments, the use is for a naive subject, i.e., a subject that does not have an E. coli infection or has not previously had a UTI. In one embodiment, the use is for a subject that is at risk of acquiring or developing a UTI, e.g., an immunocompromised or immunodeficient individual, before symptoms manifest or symptoms become severe. In certain embodiments, the use is for a subject who has been or was previously diagnosed with a UTI.

[0618] As used herein, the term “at-risk subject” refers to a human that is more prone to a condition than the average human adult population. Examples of an “at-risk subject” include persons that have one or more risk factors for UTI which can include, but are not limited to, elderly people, immunocompromised people, people with diabetes, people with known history of rUTI, people with obstructions in the urinary tract such as kidney stones, sexually active women, women after menopause, people using a catheter, people that are incontinent, people recently having undergone a urinary system procedure such as surgery on the urinary tract, etc.

[0619] In certain embodiments, the use is for a subject who has been or was previously diagnosed with an UPEC infection. In some embodiments, the use is for a subject suffering from reoccurring UTIs. In some embodiments, the use is for a subject suffering from reoccurring UTIs, but is healthy at the moment of treatment. In some embodiments, the use is for a subject having or at risk of acquiring E. coli bacteremia or sepsis. In some embodiments, a subject to be administered or applied a composition or method of the disclosure has a condition that requires them to use a catheter, such as a urinary catheter (which leads to risk of CAUTI, i.e. catheter associated UTI). In some embodiments, the use is for a subject that undergoes a pre-scheduled surgery.

[0620] In certain embodiments, the use is a human adult more than 50 years old. In certain embodiments, the use is for a human adult more than 55, more than 60 or more than 65 years old. In certain embodiments, the use is for a woman between age of about 16 to 50 years old, e.g. between age of about 16 and 35 years old. In certain embodiments, the use is for a subject that has diabetes.

### 6: Method of Treatment

[0621] In a further aspect, it is provided a method of treating or preventing a disease caused by E. coli. The method comprises administering to a subject in need thereof an effective amount of the coding RNA according to the first aspect, the pharmaceutical composition according to the second aspect, the vaccine according to the third aspect, or the kit or kit of parts according to the fourth aspect. It is also provided a method for inducing an immune response in a subject in need thereof. Suitably, the immune response is effective to prevent or treat one or more symptoms associated with UTI in the subject in need thereof.

[0622] It is also provided the use of the coding RNA according to the first aspect, the pharmaceutical composition according to the second aspect, the vaccine according to the third aspect or the kit or kit of parts according to the fourth aspect for raising an immune response in a mammal, for example, for treating and/or preventing a disease. It is also provided the use of the coding RNA according to the first aspect, the pharmaceutical composition according to the second aspect, the vaccine according to the third aspect or the kit or kit of parts according to the fourth aspect for the manufacture of a medicament for raising an immune response in a mammal, for example, for treating and/or preventing a disease, for example an E. coli infection.

[0623] Notably, embodiments relating to the previous aspects may likewise be read on and be understood as suitable embodiments of medical uses of the disclosure.

[0624] Furthermore, specific features and embodiments relating to method of treatments as provided herein may also apply for medical uses of the disclosure and vice versa.

[0625] Preventing (inhibiting) or treating a disease, in particular an infection caused by E. coli relates to inhibiting the full development of a disease or condition, for example, in a subject who is at risk for a disease such as an infection. “Treatment” refers to a therapeutic intervention that ameliorates a sign or symptom of a disease or pathological condition after it has begun to develop. The term “ameliorating”, with reference to a disease or pathological condition, refers to any observable beneficial effect of the treatment. Inhibiting a disease can include preventing or reducing the risk of the disease, such as preventing or reducing the risk of an infection with E. coli. The beneficial effect can be evidenced, for example, by a delayed onset of clinical symptoms of the disease in a susceptible subject, a reduction in severity of some or all clinical symptoms of the disease, a slower progression of the disease, a reduction in the viral load, an improvement in the overall health or well-being of the subject, or by other parameters that are specific to the particular disease. A “prophylactic” treatment is a treatment administered to a subject who does not exhibit signs of a disease or exhibits only early signs for the purpose of decreasing the risk of developing pathology.

[0626] In some embodiments, it is provided a method of treating or preventing a disease, disorder or condition, wherein the method comprises applying or administering to a subject in need thereof the coding RNA of the disclosure, and/or the composition of the disclosure, and/or the vaccine of the disclosure, and/or the kit or kit of parts of the disclosure.

[0627] In some embodiments, the disease, disorder or condition is an infectious disease caused by E. coli or a disorder related to such an infectious disease.

[0628] In a specific embodiment, the methods of inducing an immune response in a subject of the disclosure result in vaccination of the subject to induce a protective immunity against infection by the E. coli strains expressing FimH.

[0629] In one embodiment, the method induces a humoral immune response against E. coli.

[0630] In one embodiment, said humoral immune response is against E. coli FimH. In one embodiment, the method elicits a humoral immune response against E. coli, for example against E. coli FimH, in the urine of a subject.

[0631] In one embodiment, the method elicits neutralizing antibody titers against E. coli. In one embodiment, said antibodies are IgG antibodies. In one embodiment, said antibodies are against E. coli FimH. In one embodiment, the method elicits neutralizing antibody titers against E. coli, for example against E. coli FimH, in the urine of a subject.

[0632] In one embodiment, the methods of the disclosure elicit antibodies which are capable of inhibiting bacterial adhesion to uroepithelial cells. Suitable methods for measuring inhibition of bacterial adhesion are described herein and in the Examples.

[0633] In certain embodiments, the immune response induced in a subject following administration of the coding RNA, the pharmaceutical composition or the vaccine according of the disclosure is effective to eliminate a UTI.

[0634] In certain embodiments, the immune response induced in a subject following administration of the immune response induced in a subject following administration of the coding RNA, the pharmaceutical composition or the vaccine according of the disclosure is effective to prevent or reduce a symptom of UTI, for example in at least 30%, for example at least 40%, such as at least 50%, of the subjects administered with the composition. Symptoms of UTI can vary depending on the nature of the infection and can include, but are not limited to: dysuria, increased urinary frequency or urgency, pyuria, hematuria, back pain, pelvic pain, pain while urinating, fever, chills, and/or nausea.

[0635] In certain embodiments, the immune response induced in a subject following administration of the immune response induced in a subject following administration of the coding RNA, the pharmaceutical composition or the vaccine according of the disclosure is effective to prevent or reduce organ failure resulting from a UTI. In certain embodiments, the immune response induced in a subject following administration of the immune response induced in a subject following administration of the coding RNA, the pharmaceutical composition or the vaccine according of the disclosure is effective to reduce the likelihood of hospitalization of a subject suffering from a UTI. In some embodiments, the immune response induced in a subject following administration of a composition of the disclosure is effective to reduce the duration of hospitalization of a subject suffering from a UTI.

[0636] In some embodiments, applying or administering is performed via nasal administration, oral administration, sublingual administration, intramuscular injection, intravenous injection, transdermal injection, or intradermal injection. In one embodiment, applying or administering is performed via intramuscular injection.

[0637] As used herein in the context of the disclosure, the term “effective amount” refers to the amount that is sufficient to induce a desired immune effect or immune response in the subject. In certain embodiments, an “effective amount” refers to the amount which is sufficient to produce immunity in a subject to achieve one or more of the following effects in the subject: (i) prevent the development or onset of a UTI or symptom associated therewith; (ii) prevent or reduce the recurrence of a UTI or symptom associated therewith; (iii) prevent, reduce or ameliorate the severity of a UTI or symptom associated therewith; (iv) reduce the duration of infection UTI or symptom associated therewith; (v) prevent the clinical progression of a UTI or symptom associated therewith; (vi) cause regression of a UTI or symptom associated therewith; (vii) prevent or reduce organ failure resulting from UTI; (viii) reduce the chance or frequency of hospitalization of a subject having a UTI; (ix) reduce hospitalization length of a subject having a UTI; (x) eliminate a UTI; and/or (xi) enhance or improve the prophylactic or therapeutic effect(s) of another therapy.

[0638] Selection of a particular effective dose can be determined (e.g., via clinical trials) by those skilled in the art based upon the consideration of several factors, including the disease to be treated or prevented, the symptoms involved, the medical history of the subject, the physical condition of the subject, such as the subject's age, weight and/or immune status, the composition administered, and other factors known by the skilled artisan. The precise dose to be employed in the formulation will also depend on the route of administration, and the severity of disease, and should be decided according to the judgment of the practitioner and each patient's circumstances. Effective doses can be extrapolated from dose-response curves derived from in vitro or animal model test systems.

[0639] In one embodiment, the subject in need is a mammalian subject, for example a human subject.

[0640] In certain embodiments, a method of the disclosure is administered or applied to a naive subject, i.e., a subject that does not have an E. coli infection or has not previously had a UTI. In one embodiment, a composition or method of the disclosure is administered or applied to a subject that is at risk of acquiring or developing a UTI, e.g., an immunocompromised or immunodeficient individual, before symptoms manifest or symptoms become severe. In certain embodiments, method of the disclosure is administered or applied to a subject who has been or was previously diagnosed with a UTI.

[0641] In certain embodiments, a method of the disclosure is administered or applied to a subject who has been or was previously diagnosed with a UPEC infection. In some embodiments, a composition or method of the disclosure is administered or applied to a subject suffering from reoccurring UTIs. In some embodiments, a method of the invention is administered or applied to a subject suffering from reoccurring UTIs, but is healthy at the moment of treatment. In some embodiments, a method of the disclosure is administered or applied to a subject having or at risk of acquiring E. coli bacteremia or sepsis. In some embodiments, a subject to be applied a method of the disclosure has a condition that requires them to use a catheter, such as a urinary catheter (which leads to risk of CAUTI, i.e. catheter associated UTI). In some embodiments, a method of the disclosure is applied to a subject that undergoes a pre-scheduled surgery.

[0642] In certain embodiments, a subject to be applied a method of the disclosure is a human subject, for example, a human subject at risk of having disease UTI. In certain embodiments, a subject to be applied a composition or method of the disclosure is a human adult more than 50 years old. In certain embodiments, a subject to be applied a method of the disclosure is a human adult more than 55, more than 60 or more than 65 years old.

[0643] In certain embodiments, a subject to be applied a method of the disclosure is a woman between age of about 16 to 50 years old, e.g. between age of about 16 and 35 years old. In certain embodiments, a subject to be applied a method of the disclosure has diabetes.

### BRIEF DESCRIPTION OF TABLES

[0644] Table 1: Sequences (amino acid sequences and coding sequences)
[0645] Table 2: RNA constructs
[0646] Table 3: RNA constructs encoding the antigen designs used in the examples
[0647] Table 4: Lipid-based carrier composition of the examples
[0648] Table 5: RNA constructs used for Western blot analysis (Example 2.1)
[0649] Table 6: Vaccination regimen (Example 2.2)
[0650] Table 7: BAI titers of serum antibody responses against E. coli FimH antigen designs (Example 2.3)
[0651] Table 8: Vaccination regimen (Example 3.1)
[0652] Table 9: BAI titers of serum antibody responses against E. coli FimH antigen designs (Example 3.2)
[0653] Table 10: mRNA constructs used for Western blot analysis (Example 4.1)
[0654] Table 11: Vaccination regimen (Example 4.2)
[0655] Table 12: BAI titers of serum antibody responses against E. coli FimH antigen designs (Example 4.3)
[0656] Table 13: additional sequences shorter than 10 specifically defined nucleotides or 4 specifically defined amino acid.

### NUMBERED EMBODIMENTS

[0657] In the following, embodiments of the present invention are provided as a numbered embodiments list (embodiment 1 to embodiment 110).

[0658] Embodiment 1. A coding RNA comprising at least one untranslated region (UTR) and at least one coding sequence encoding an antigenic polypeptide which is selected or derived from Escherichia coli type 1 fimbriae D-mannose specific adhesin (FimH).

[0659] Embodiment 2. The coding RNA according to embodiment 1, wherein the E. coli FimH comprises an amino acid sequence which is identical or at least 70%, 80%, 85%, 86%, 87%, 88%, 89%, 90%, 91%, 92%, 93%, 94%, 95%, 96%, 97%, 98%, or 99% identical to any one of SEQ ID NOs: 177-186, 247-256 or is an immunogenic fragment or immunogenic variant thereof.

[0660] Embodiment 3. The coding RNA according to embodiments 1 or 2, wherein the coding sequence additionally encodes one or more further peptide or protein elements selected from: a donor strand peptide, a signal peptide, an antigen clustering domain, or a transmembrane domain.

[0661] Embodiment 4. The coding RNA according to embodiment 3, wherein the one or more further peptide or protein element(s) is a donor strand peptide, optionally wherein the coding sequence encodes the following elements in N-terminal to C-terminal direction: the antigenic polypeptide which is selected or is derived from E. coli FimH; and the donor strand peptide.

[0662] Embodiment 5. The coding RNA according to embodiment 4, wherein the donor strand peptide comprises or consists of the amino acid sequence of SEQ ID NO: 338 or SEQ ID NO: 339 or a variant thereof, optionally wherein the variant of SEQ ID NO: 338 or SEQ ID NO: 339 has from 1 to 5, such as 1, 2, 3 or 4 single amino acid mutations compared to SEQ ID NO: 338 or SEQ ID NO: 339.

[0663] Embodiment 6. The coding RNA according to embodiment 4, wherein the donor strand peptide comprises or consists of the amino acid sequence of SEQ ID NO: 338.

[0664] Embodiment 7. The coding RNA according to any one of embodiments 1 to 6, wherein the coding sequence additionally encodes a peptide linker.

[0665] Embodiment 8. The coding RNA according to embodiment 1 to 7, wherein the coding sequence encodes the following elements in N-terminal to C-terminal direction: the antigenic polypeptide which is selected or derived from E. coli FimH; the peptide linker element; and the donor strand peptide.

[0666] Embodiment 9. The coding RNA according to embodiments 7 or 8, wherein the peptide linker comprises or consists of any one of SEQ ID NOs: 352-358.

[0667] Embodiment 10. The coding RNA according to embodiments 7 to 9, wherein the peptide linker comprises or consists of SEQ ID NO: 352.

[0668] Embodiment 11. The coding RNA of any one of the preceding embodiments, wherein the antigenic polypeptide is in a low mannose binding affinity conformation.

[0669] Embodiment 12. The coding RNA according to any one of embodiments 1 to 11, wherein the coding sequence additionally encodes an antigen clustering domain.

[0670] Embodiment 13. The coding RNA according to embodiment 12, wherein the antigen clustering domain is selected or derived from ferritin or lumazine synthase.

[0671] Embodiment 14. The coding RNA according to any one of embodiments 12 or 13, wherein the amino acid sequence of the antigen clustering domain is identical or at least 70%, 80%, 85%, 86%, 87%, 88%, 89%, 90%, 91%, 92%, 93%, 94%, 95%, 96%, 97%, 98%, or 99% identical to any one of amino acid sequences SEQ ID NOs: 457-459, 443, 444, or fragment or variant thereof.

[0672] Embodiment 15. The coding RNA according to any one of embodiments 1 to 11, wherein the coding sequence additionally encodes a transmembrane domain.

[0673] Embodiment 16. The coding RNA according to claim 15, wherein the transmembrane domain is heterologous and is optionally selected or derived is or is derived from an influenza HA transmembrane domain, for example from SEQ ID NO: 478.

[0674] Embodiment 17. The coding RNA according to any one of embodiments 1 to 16, wherein the coding sequence additionally encodes a signal peptide.

[0675] Embodiment 18. The coding RNA according to embodiment 17, wherein the signal peptide is selected or derived from FimH, FimC, immunoglobulin Kappa IgK (IgK), immunoglobulin IgE (IgE), tissue plasminogen activator (TPA or HsPLAT), human serum albumin (HSA or HsALB), or MHC class I lymphocyte antigen (HLA-A2), optionally wherein the amino acid sequences of the signal peptides is identical or at least 70%, 80%, 85%, 86%, 87%, 88%, 89%, 90%, 91%, 92%, 93%, 94%, 95%, 96%, 97%, 98%, or 99% identical to any one of amino acid sequences SEQ ID NOs: 394-400, or fragment or variant thereof.

[0676] Embodiment 19. The coding RNA according to embodiments 17 or 18, wherein the signal peptide is selected or derived from IgE or IgK, optionally wherein the amino acid sequences of said signal peptides is identical or at least 70%, 80%, 85%, 86%, 87%, 88%, 89%, 90%, 91%, 92%, 93%, 94%, 95%, 96%, 97%, 98%, or 99% identical to any one of amino acid sequences SEQ ID NOs: 394, 395, or fragment or variant thereof.

[0677] Embodiment 20 (a). The coding RNA according to any one of embodiments 1 to 19, wherein the coding sequence encodes the following elements for example in N-terminal to C-terminal direction:
[0678] a) a signal peptide, the antigenic polypeptide;
[0679] b) a signal peptide, the antigenic polypeptide, a peptide linker, a donor strand peptide;
[0680] c) an antigen clustering domain, a peptide linker, the antigenic polypeptide, a peptide linker, a donor strand peptide;
[0681] d) a signal peptide, an antigen clustering domain, a peptide linker, the antigenic polypeptide, a peptide linker, a donor strand peptide;
[0682] e) a signal peptide, the antigenic polypeptide, a peptide linker, a donor strand peptide, a peptide linker, an antigen clustering domain; or
[0683] f) a signal peptide, the antigenic polypeptide, a peptide linker, a donor strand peptide, a peptide linker, a transmembrane domain.

[0684] Embodiment 20 (b). The coding RNA according to any one of embodiments 1 to 19 and 20 (a), wherein the coding sequence encodes the following elements for example in N-terminal to C-terminal direction: a signal peptide, the antigenic polypeptide, a peptide linker, and a donor strand peptide; optionally wherein the signal peptide is selected from SEQ ID NOs: 394-400, optionally wherein the signal peptide is SEQ ID NO: 395; the antigenic polypeptide is selected from SEQ ID NOs: 247-256, optionally wherein the antigenic polypeptide is SEQ ID NO: 247; the peptide linker is selected from SEQ ID NOs: 352-354, optionally wherein the peptide linker is SEQ ID NO: 352; the donor strand peptide is selected from SEQ ID NOs: 338, 339, optionally wherein the donor strand peptide is SEQ ID NO: 338.

[0685] Embodiment 21. The coding RNA according to any one of embodiments 1 to 19, wherein the coding sequence encodes the following elements for example in N-terminal to C-terminal direction: a signal peptide, the antigenic polypeptide as defined herein, a (first) peptide linker, a donor strand peptide, a (second) peptide linker; and an antigen clustering domain; optionally wherein the signal peptide is selected from SEQ ID NOs: 394-400, optionally wherein the signal peptide is SEQ ID NO: 394; the antigenic polypeptide is selected from SEQ ID NOs: 247-256, optionally wherein the antigenic polypeptide is SEQ ID NO: 247; the (first) peptide linker is selected from SEQ ID NOs: 352-354, optionally wherein the (first) peptide linker is SEQ ID NO: 352; the donor strand peptide is selected from SEQ ID NOs: 338, 339, optionally wherein the donor strand peptide is SEQ ID NO: 338; the (second) peptide linker is selected from SEQ ID NOs: 355-358, optionally wherein the (second) peptide linker is SEQ ID NO: 355; the antigen clustering domain is selected from SEQ ID NOs: 443, 444, 457-459, optionally wherein the peptide linker is SEQ ID NOs: 444 or 459.

[0686] Embodiment 22. The coding RNA according to any one of the preceding embodiments, wherein the coding sequence encodes an amino acid sequence which is identical or at least 70%, 80%, 85%, 86%, 87%, 88%, 89%, 90%, 91%, 92%, 93%, 94%, 95%, 96%, 97%, 98%, or 99% identical to any one of SEQ ID NOs: 177-186, 247-256, 498-520, 1277, or an immunogenic fragment or immunogenic variant thereof.

[0687] Embodiment 23 (a). The coding RNA according to any one of the preceding embodiments, wherein the coding sequence encodes an amino acid sequence which is identical or at least 90%, 91%, 92%, 93%, 94%, 95%, 96%, 97%, 98%, or 99% identical to any one of SEQ ID NO: 504, 508, and 509, or an immunogenic fragment or immunogenic variant thereof.

[0688] Embodiment 23 (b). The coding RNA according to any one of the preceding embodiments, wherein the coding sequence encodes an amino acid sequence which is identical or at least 90%, 91%, 92%, 93%, 94%, 95%, 96%, 97%, 98%, or 99% identical to any one of SEQ ID NO: 504, or an immunogenic fragment or immunogenic variant thereof.

[0689] Embodiment 23 (c). The coding RNA according to any one of the preceding embodiments, wherein the coding sequence encodes an amino acid sequence which is identical or at least 90%, 91%, 92%, 93%, 94%, 95%, 96%, 97%, 98%, or 99% identical to any one of SEQ ID NO: 508, or an immunogenic fragment or immunogenic variant thereof.

[0690] Embodiment 23 (d). The coding RNA according to any one of the preceding embodiments, wherein the coding sequence encodes an amino acid sequence which is identical or at least 90%, 91%, 92%, 93%, 94%, 95%, 96%, 97%, 98%, or 99% identical to any one of SEQ ID NO: 509, or an immunogenic fragment or immunogenic variant thereof.

[0691] Embodiment 24. The coding RNA according to any one of the embodiments 1 to 22, wherein the coding sequence comprises a nucleic acid sequences which is identical or at least 70%, 80%, 85%, 86%, 87%, 88%, 89%, 90%, 91%, 92%, 93%, 94%, 95%, 96%, 97%, 98%, or 99% identical to the sequences according to any one of SEQ ID NOs: 187-246, 257-316, 523-545, 548-570, 573-595, 598-620, 623-645, 648-670, or a fragment or a variant thereof.

[0692] Embodiment 25. The coding RNA according to any one of the preceding embodiments, wherein the coding sequence is a codon modified coding sequence, wherein the amino acid sequence encoded by the at least one codon modified coding sequence is optionally not being modified compared to the amino acid sequence encoded by the corresponding wild type coding sequence, optionally wherein the at least one codon modified coding sequence is selected from C maximized coding sequence, CAI maximized coding sequence, human codon usage adapted coding sequence, G/C content modified coding sequence, and G/C optimized coding sequence, or any combination thereof.

[0693] Embodiment 26 (a). The coding RNA according to embodiment 25, wherein the coding sequence comprises at least one of the nucleic acid sequences being identical or at least 90%, 91%, 92%, 93%, 94%, 95%, 96%, 97%, 98%, or 99% identical to the sequences according to any one of SEQ ID NOs: 523-545, 548-570, 573-595, 598-620, 623-645, 648-670, or a fragment or variant thereof.

[0694] Embodiment 26 (b). The coding RNA according to any one of the preceding embodiments, wherein the coding sequence comprises at least one of the nucleic acid sequences being identical or at least 70%, 80%, 85%, 86%, 87%, 88%, 89%, 90%, 91%, 92%, 93%, 94%, 95%, 96%, 97%, 98%, or 99% identical to the sequences according to any one of SEQ ID NOs: 529, 533, 534, 554, 558, 559, 579, 583, 584, 604, 608, 609, 629, 633, 634, 654, 658, 659, or a fragment or variant thereof.

[0695] Embodiment 27. The coding RNA according to any one of the preceding embodiments wherein the coding sequence is G/C optimized coding sequence.

[0696] Embodiment 28. The coding RNA according to embodiment 27, wherein the coding sequence comprises at least one of the nucleic acid sequences being identical or at least 90%, 91%, 92%, 93%, 94%, 95%, 96%, 97%, 98%, or 99% identical to the sequences according to any one of SEQ ID NO: 523-545, 548-570, 648-670, or a fragment or variant thereof.

[0697] Embodiment 29. The coding RNA according to embodiment 27, wherein the coding sequence comprises at least one of the nucleic acid sequences being identical or at least 70%, 80%, 85%, 86%, 87%, 88%, 89%, 90%, 91%, 92%, 93%, 94%, 95%, 96%, 97%, 98%, or 99% identical to the sequences according to any one of SEQ ID NOs: 529, 533, 534, 554, 558, 559, 654, 658, 659, or a fragment or variant thereof.

[0698] Embodiment 30. The coding RNA according to any one of the preceding embodiments, wherein the at least one UTR is selected from at least one 5′-UTR and/or at least one 3′-UTR, optionally wherein the at least one UTR is selected from at least one heterologous 5′-UTR and/or at least one heterologous 3′-UTR.

[0699] Embodiment 31. The coding RNA according to embodiment 30, wherein the coding RNA comprises at least one 3′-UTR, wherein the at least one 3′-UTR comprises or consists of a nucleic acid sequence derived from a 3′-UTR of a gene selected from PSMB3, ALB7, alpha-globin, CASP1, COX6B1, GNAS, NDUFA1 and RPS9, or from a homolog, a fragment or a variant of any one of these genes.

[0700] Embodiment 32. The coding RNA according to embodiment 31, wherein the at least one heterologous 3′-UTR comprises or consists of a nucleic acid sequence being identical or at least 70%, 80%, 85%, 86%, 87%, 88%, 89%, 90%, 91%, 92%, 93%, 94%, 95%, 96%, 97%, 98%, or 99% identical to SEQ ID NOs: 67-90, 109-120, or a fragment or a variant thereof.

[0701] Embodiment 33. The coding RNA according to embodiment 31, wherein the coding RNA comprises a 3′-UTR derived or selected from a PSMB3 gene.

[0702] Embodiment 34. The coding RNA according to embodiment 33, wherein the 3′-UTR derived or selected from a PSMB3 gene comprises or consist of a nucleic acid sequence being identical or at least 70%, 80%, 85%, 86%, 87%, 88%, 89%, 90%, 91%, 92%, 93%, 94%, 95%, 96%, 97%, 98%, or 99% identical to any one of SEQ ID NO: 67, 68, 109-120, or a fragment or a variant thereof.

[0703] Embodiment 35. The coding RNA according to any one of embodiments 30 to 34, wherein the coding RNA comprises at least one 5′-UTR, wherein the at least one (heterologous) 5′-UTR comprises or consists of a nucleic acid sequence derived from a 5′-UTR of a gene selected from HSD17B4, RPL32, ASAH1, ATP5A1, MP68, NDUFA4, NOSIP, RPL31, SLC7A3, TUBB4B and UBQLN2, or from a homolog, a fragment or variant thereof.

[0704] Embodiment 36. The coding RNA according to embodiment 35, wherein at least one (heterologous) 5′-UTR derived or selected from HSD17B4, RPL32, ASAH1, ATP5A1, MP68, NDUFA4, NOSIP, RPL31, SLC7A3, TUBB4B, and UBQLN2 comprises or consist of a nucleic acid sequence being identical or at least 70%, 80%, 85%, 86%, 87%, 88%, 89%, 90%, 91%, 92%, 93%, 94%, 95%, 96%, 97%, 98%, or 99% identical to any one of SEQ ID NOs: 1-32, 65, 66, or a fragment or a variant thereof.

[0705] Embodiment 37. The coding RNA according to embodiments 35 or 36, wherein the at least one (heterologous) 5′-UTR is selected from HSD17B4, optionally wherein the 5′-UTR derived or selected from HSD17B4 comprises or consists of a nucleic acid sequence being identical or at least 70%, 80%, 85%, 86%, 87%, 88%, 89%, 90%, 91%, 92%, 93%, 94%, 95%, 96%, 97%, 98%, or 99% identical to any one of SEQ ID NOs: 1, 2, 65, 66, or a fragment or a variant thereof.

[0706] Embodiment 38. The coding RNA according to any one of embodiments 30 to 37, wherein the at least one (heterologous) 5′-UTR is selected from HSD17B4 and the at least one (heterologous) 3′-UTR is selected from PSMB3.

[0707] Embodiment 39. The coding RNA according to any one of the preceding embodiments, wherein the coding RNA of the invention is monocistronic.

[0708] Embodiment 40. The coding RNA according to any one of the preceding embodiments, comprising at least one poly(A) sequence, optionally wherein the at least one poly(A) sequence comprises about 40 to about 500 adenosine nucleotides, for example about 60 to about 250 adenosine nucleotides, for example about 60 to about 150 adenosine nucleotides.

[0709] Embodiment 41. The coding RNA according to embodiment 40, wherein the at least one poly(A) sequence comprises about 100 adenosine nucleotides.

[0710] Embodiment 42. The coding RNA according to embodiments 40 or 41, wherein the at least one poly(A) sequence is located directly at the 3′ terminus, optionally, wherein the 3′ terminal nucleotide is an adenosine.

[0711] Embodiment 43. The coding RNA according to any one of the preceding embodiments, comprising at least one poly(C) sequence and/or at least one miRNA binding site and/or histone-stem loop sequence.

[0712] Embodiment 44. The coding RNA according to embodiment 43, comprising at least one histone stem-loop.

[0713] Embodiment 45. The coding RNA according to embodiment 44, wherein the histone-stem loop sequence comprises or consists of a nucleic acid sequence identical or at least 70%, 80%, 90%, 91%, 92%, 93%, 94%, 95%, 96%, 97%, 98%, or 99% identical to any one of SEQ ID NOs: 136, 137 or a fragment or a variant thereof.

[0714] Embodiment 46. The coding RNA according to any one of the preceding embodiments, comprising at least one 3′-terminal sequence element, optionally wherein the 3′-terminal sequence element comprises or consists of an RNA sequence being identical or at least 70%, 80%, 90%, 91%, 92%, 93%, 94%, 95%, 96%, 97%, 98%, or 99% identical to any one of SEQ ID NOs: 138-172, or a fragment or variant thereof.

[0715] Embodiment 47. The coding RNA according to embodiment 47, comprising a 3′-terminal sequence element comprising or consisting of an RNA sequence being identical or at least 70%, 80%, 90%, 91%, 92%, 93%, 94%, 95%, 96%, 97%, 98%, or 99% identical to SEQ ID NO: 144, or a fragment or variant thereof.

[0716] Embodiment 48. The coding RNA according to any one of the preceding embodiments, comprising a 5′-terminal sequence element comprising or consisting of an RNA sequence being identical or at least 70%, 80%, 90%, 91%, 92%, 93%, 94%, 95%, 96%, 97%, 98%, or 99% identical to any one of SEQ ID NOs: 121-127, or a fragment or variant of these sequences.

[0717] Embodiment 49. The coding RNA according to embodiment 48, comprising a 5′-terminal sequence element comprising or consisting of an RNA sequence being identical or at least 70%, 80%, 90%, 91%, 92%, 93%, 94%, 95%, 96%, 97%, 98%, or 99% identical to SEQ ID NO: 122, or a fragment or variant thereof.

[0718] Embodiment 50. The coding RNA according to any one of the preceding embodiments, comprising a 5′-cap structure.

[0719] Embodiment 51. The coding RNA according to embodiment 50, wherein the 5′-cap structure is selected from a cap1 structure or a modified cap1 structure.

[0720] Embodiment 52. The coding RNA according to embodiments 50 or 51, wherein the 5′-cap structure has been added co-transcriptionally using tri-nucleotide cap analogue, in particular in an RNA in vitro transcription.

[0721] Embodiment 53. The coding RNA according to any one of embodiments 50 to 52, comprising a cap1 structure.

[0722] Embodiment 54. The coding RNA according to embodiment 53, wherein the cap1 structure is formed via co-transcriptional capping using tri-nucleotide cap analogues m7G(5′)ppp(5′)(2′OMeA)pG or m7G(5′)ppp(5′)(2′OMeG)pG.

[0723] Embodiment 55. The coding RNA according to embodiment 54, wherein the cap1 analogue is m7G(5′)ppp(5′)(2′OMeA)pG.

[0724] Embodiment 56. The coding RNA according to any one of the preceding embodiments, comprising at least one modified nucleotide, optionally selected from pseudouridine (ψ) or N1-methylpseudouridine (m1ψ).

[0725] Embodiment 57. The coding RNA according to embodiment 56, wherein the coding sequence comprises at least one modified nucleotide selected from pseudouridine (ψ) and N1-methylpseudouridine (m1ψ), optionally wherein essentially all uracil nucleotides are replaced by pseudouridine (ψ) nucleotides and/or N1-methylpseudouridine (m1ψ) nucleotides.

[0726] Embodiment 58. The coding RNA according to any one of the preceding embodiments, wherein the nucleic acid, comprises at least one modified nucleotide which is N1-methylpseudouridine (m1ψ).

[0727] Embodiment 59. The coding RNA according to embodiments 57 or 58, wherein essentially all uracil nucleotides are replaced N1-methylpseudouridine (m1ψ) nucleotides.

[0728] Embodiment 60. The coding RNA according to any one of the preceding embodiments, wherein the coding RNA is selected from an mRNA, a coding self-replicating RNA, a coding circular RNA, a coding viral RNA, or a coding replicon RNA.

[0729] Embodiment 61. The coding RNA according to embodiment 60, wherein the coding RNA is an mRNA.

[0730] Embodiment 62. The coding RNA according to any one of the preceding embodiments, wherein the coding RNA is an in vitro transcribed RNA, optionally wherein RNA in vitro transcription has been performed in the presence of a sequence optimized nucleotide mixture.

[0731] Embodiment 63. The coding RNA according to any one of the preceding embodiments, wherein the coding RNA is a purified RNA, optionally wherein the RNA has been purified by RP-HPLC, AEX, SEC, hydroxyapatite chromatography, TFF, filtration, precipitation, core-bead flow through chromatography, oligo(dT) purification, cellulose-based purification, or any combination thereof.

[0732] Embodiment 64. The coding RNA according to embodiment 63, wherein the RNA has been purified by RP-HPLC and/or TFF.

[0733] Embodiment 65. The coding RNA according to any one of the preceding embodiments, wherein the coding RNA has an integrity of at least about 50%, for example of at least about 60%, more for example of at least about 70%, for example of at least about 80%.

[0734] Embodiment 66. The coding RNA according to any one of the preceding embodiments, wherein comprising the following elements, for example in 5′ to 3′ direction:
[0735] A) a 5′-cap structure;
[0736] B) a 5′-UTR for example selected or derived from a 5′-UTR of a HSD17B4 gene;
[0737] C) at least one coding sequence encoding an antigenic polypeptide which is selected or derived from Escherichia coli FimH;
[0738] D) a 3′-UTR for example selected or derived from a 3′-UTR of a PSMB3 gene; E) optionally, a histone stem-loop; and
[0739] F) a poly(A) sequence for example comprising about 100 A nucleotides.

[0740] Embodiment 67. The coding RNA according to any one of the preceding embodiments, comprising or consisting of a nucleic acid sequence which is identical or at least 70%, 80%, 85%, 86%, 87%, 88%, 89%, 90%, 91%, 92%, 93%, 94%, 95%, 96%, 97%, 98%, or 99% identical to a nucleic acid sequence according to any one of SEQ ID NOs: 673-695, 698-720, 723-745, 748-770, 773-795, 798-820, 823-845, 848-870, 873-895, 898-920, 923-945, 948-970, 973-995, 998-1020, 1023-1045, 1048-1070, 1073-1095, 1098-1120, 1123-1145, 1148-1170, 1173-1195, 1198-1220, 1223-1245, 1248-1270 or a fragment or variant thereof.

[0741] Embodiment 68. The coding RNA according to embodiment 67, wherein at least one, for example all uracil nucleotides in said RNA sequences are replaced by pseudouridine (ψ) nucleotides and/or N1-methylpseudouridine (m1ψ) nucleotides.

[0742] Embodiment 69. The coding RNA according to any one of the preceding embodiments, wherein the coding RNA comprises or consists of a nucleic acid sequence which is identical or at least 70%, 80%, 85%, 86%, 87%, 88%, 89%, 90%, 91%, 92%, 93%, 94%, 95%, 96%, 97%, 98%, or 99% identical to a nucleic acid sequence according to any one of SEQ ID NOs: 679, 704, 729, 754, 779, 804, 829, 854, 879, 904, 929, 954, 979, 1004, 1029, 1054, 1079, 1104, 1129, 1154, 1179, 1204, 1229, 1254 or a fragment or variant thereof, optionally comprising a 5′-terminal cap1 structure.

[0743] Embodiment 70. The coding RNA according to any one of the preceding embodiments, wherein the coding RNA comprises or consists of a nucleic acid sequence which is identical or at least 70%, 80%, 85%, 86%, 87%, 88%, 89%, 90%, 91%, 92%, 93%, 94%, 95%, 96%, 97%, 98%, or 99% identical to a nucleic acid sequence according to any one of SEQ ID NOs: 683, 708, 733, 758, 783, 808, 833, 858, 883, 908, 933, 958, 983, 1008, 1033, 1058, 1083, 1108, 1133, 1158, 1183, 1208, 1233, 1258 or a fragment or variant thereof, optionally comprising a 5′-terminal cap1 structure.

[0744] Embodiment 71. The coding RNA according to any one of the preceding embodiments, wherein In one embodiment, the coding RNA comprises or consists of a nucleic acid sequence which is identical or at least 70%, 80%, 85%, 86%, 87%, 88%, 89%, 90%, 91%, 92%, 93%, 94%, 95%, 96%, 97%, 98%, or 99% identical to a nucleic acid sequence according to any one of SEQ ID NOs: 684, 709, 734, 759, 784, 809, 834, 859, 884, 909, 934, 959, 984, 1009, 1034, 1059, 1084, 1109, 1134, 1159, 1184, 1209, 1234, 1259 or a fragment or variant thereof, optionally comprising a 5′-terminal cap1 structure.

[0745] Embodiment 72 (a). The coding RNA according to embodiment 69, wherein the coding RNA is a 5′ capped (cap1) mRNA that comprises or consists of an RNA sequence consisting of: non-modified ribonucleotides (A, G, C, U); non-modified ribonucleotides (A, G, C) and chemically modified pseudouridine (ψ) ribonucleotides; or non-modified ribonucleotides (A, G, C) and chemically modified N1-methylpseudouridine (m1ψ) ribonucleotides;
[0746] which is identical to an RNA sequence according to any one of SEQ ID NOs: 679, 829, 979, 1129, 1271, 1274 or a fragment or variant thereof.

[0747] Embodiment 72 (b). The coding RNA according to embodiment 69, wherein the coding RNA is a 5′ capped (cap1) mRNA that comprises or consists of an RNA sequence consisting of: non-modified ribonucleotides (A, G, C) and chemically modified N1-methylpseudouridine (m1ψ) ribonucleotides;
[0748] which is identical to an RNA sequence according to SEQ ID NO: 1271, or a fragment or variant thereof.

[0749] Embodiment 72 (c). The coding RNA according to embodiment 69, wherein the coding RNA is a 5′ capped (cap1) mRNA that comprises or consists of an RNA sequence consisting of: non-modified ribonucleotides (A, G, C) and chemically modified pseudouridine (ψ) ribonucleotides; which is identical to an RNA sequence according to SEQ ID NO: 1274 or a fragment or variant thereof.

[0750] Embodiment 73 (a). The coding RNA according to embodiment 70, wherein the coding RNA is a 5′ capped (cap1) mRNA that comprises or consists of an RNA sequence consisting of: non-modified ribonucleotides (A, G, C, U); non-modified ribonucleotides (A, G, C) and chemically modified pseudouridine (ψ) ribonucleotides; or non-modified ribonucleotides (A, G, C) and chemically modified N1-methylpseudouridine (m1ψ) ribonucleotides;
[0751] which is identical to an RNA sequence according to any one of SEQ ID NOs: 683, 833, 983, 1133, 1272, 1275 or a fragment or variant thereof.

[0752] Embodiment 73 (b). The coding RNA according to embodiment 70, wherein the coding RNA is a 5′ capped (cap1) mRNA that comprises or consists of an RNA sequence consisting of: non-modified ribonucleotides (A, G, C) and chemically modified N1-methylpseudouridine (m1ψ) ribonucleotides;
[0753] which is identical to an RNA sequence according to SEQ ID NO: 1272, or a fragment or variant thereof.

[0754] Embodiment 73 (c). The coding RNA according to embodiment 70, wherein the coding RNA is a 5′ capped (cap1) mRNA that comprises or consists of an RNA sequence consisting of: non-modified ribonucleotides (A, G, C) and chemically modified pseudouridine (ψ) ribonucleotides; which is identical to an RNA sequence according to SEQ ID NO: 1275 or a fragment or variant thereof.

[0755] Embodiment 74 (a). The coding RNA according to embodiment 71, wherein the coding RNA is a 5′ capped (cap1) mRNA that comprises or consists of an RNA sequence consisting of: non-modified ribonucleotides (A, G, C, U); non-modified ribonucleotides (A, G, C) and chemically modified pseudouridine (ψ) ribonucleotides; or non-modified ribonucleotides (A, G, C) and chemically modified N1-methylpseudouridine (m1ψ) ribonucleotides;
[0756] which is identical to an RNA sequence according to any one of SEQ ID NOs: 684, 834, 984, 1134, 1273, 1276 or a fragment or variant thereof.

[0757] Embodiment 74 (b). The coding RNA according to embodiment 69, wherein the coding RNA is a 5′ capped (cap1) mRNA that comprises or consists of an RNA sequence consisting of: non-modified ribonucleotides (A, G, C) and chemically modified N1-methylpseudouridine (m1ψ) ribonucleotides;
[0758] which is identical to an RNA sequence according to SEQ ID NO: 1273, or a fragment or variant thereof.

[0759] Embodiment 74 (c). The coding RNA according to embodiment 69, wherein the coding RNA is a 5′ capped (cap1) mRNA that comprises or consists of an RNA sequence consisting of: non-modified ribonucleotides (A, G, C) and chemically modified pseudouridine (ψ) ribonucleotides; which is identical to an RNA sequence according to SEQ ID NO: 1276 or a fragment or variant thereof.

[0760] Embodiment 75. A pharmaceutical composition comprising the coding RNA according to any one of the preceding embodiments.

[0761] Embodiment 76. The pharmaceutical composition according to embodiment 75, comprising at least one pharmaceutically acceptable carrier or excipient.

[0762] Embodiment 77. The pharmaceutical composition according to embodiments 75 or 76, comprising a lipid-based carrier, optionally wherein the coding RNA is formulated in the lipid-based carrier.

[0763] Embodiment 78. The pharmaceutical composition according to embodiment 77, wherein the lipid-based carrier is selected from liposomes, lipid nanoparticles, lipoplexes, solid lipid nanoparticles, lipo-polylexes, and/or nanoliposomes.

[0764] Embodiment 79. The pharmaceutical composition according to embodiment 78, wherein the lipid-based carrier is a lipid nanoparticle, optionally wherein the lipid nanoparticle encapsulates the coding RNA.

[0765] Embodiment 80. The pharmaceutical composition according to any one of embodiments 75 to 79, wherein the coding RNA is formulated in at least one cationic or polycationic compound.

[0766] Embodiment 81. The pharmaceutical composition according to embodiment 80, wherein the at least one cationic or polycationic compound is selected from a cationic or polycationic polymer, a cationic or polycationic polysaccharide, a cationic or polycationic lipid, a cationic or polycationic protein, a cationic or polycationic peptide, or any combinations thereof.

[0767] Embodiment 82. The pharmaceutical composition according to any one of embodiments 77 to 81, wherein the lipid-based carrier comprises at least one lipid selected from an aggregation-reducing lipid, a cationic lipid or ionizable lipid, a neutral lipid or phospholipid, or a steroid, steroid analogue or sterol, or any combinations thereof.

[0768] Embodiment 83. The pharmaceutical composition according to embodiment 82, the lipid-based carrier comprises an aggregation-reducing lipid, a cationic lipid or ionizable lipid, a neutral lipid or phospholipid, and a steroid, steroid analogue or sterol.

[0769] Embodiment 84. The pharmaceutical composition according to any one of embodiments 77 to 83, wherein the lipid-based carrier comprises a cationic lipid selected or derived from Formula III, for example formula III-3.

[0770] Embodiment 85. The pharmaceutical composition according to any one of embodiments 77 to 84, wherein the lipid-based carrier comprises a cationic lipid selected or derived from ALC-0315.

[0771] Embodiment 86. The pharmaceutical composition according to any one of embodiments 77 to 85, wherein the lipid-based carrier comprises an aggregation reducing lipid selected from a polymer conjugated lipid, optionally wherein the polymer conjugated lipid is a PEG-conjugated lipid selected or derived from Formula IVa, for example selected or derived from ALC-0159.

[0772] Embodiment 87. The pharmaceutical composition according to any one of embodiments 77 to 86, wherein the lipid-based carrier comprises a neutral lipid selected or derived from DSPC.

[0773] Embodiment 88. The pharmaceutical composition according to any one of embodiments 77 to 87, wherein the lipid-based carrier comprises a steroid, steroid analogue or sterol, which is optionally selected or derived from cholesterol.

[0774] Embodiment 89. The pharmaceutical composition according to any one of embodiments 77 to 88, wherein the lipid-based carrier comprises
[0775] (i) at least one cationic lipid, for example according to embodiment 84 or 85;
[0776] (ii) at least one neutral lipid, for example according to embodiment 87;
[0777] (iii) at least one steroid, steroid analogue or sterol, for example according to embodiment 88; and
[0778] (iv) at least one aggregation reducing lipid, for example according to embodiment 86.

[0779] Embodiment 90. The pharmaceutical composition according to any one of embodiments 77 to 89, wherein the lipid-based carrier comprises
[0780] (i) at least one cationic lipid selected from ALC-0315;
[0781] (ii) at least one neutral lipid selected from DSPC;
[0782] (iii) at least one steroid, steroid analogue or sterol selected from cholesterol; and
[0783] (iv) at least one aggregation reducing lipid selected from ALC-0159.

[0784] Embodiment 91. The pharmaceutical composition according to any one of embodiments 89 to 90, wherein the lipid base carrier comprises (i) to (iv) in a molar ratio of about 20-60% cationic lipid or ionizable lipid, about 5-25% neutral lipid, about 25-55% steroid or steroid analogue, and about 0.5-15% aggregation reducing lipid Embodiment 92. The pharmaceutical composition according to any one of embodiments 77 to 91, wherein the wt/wt ratio of lipid to coding RNA in the lipid-based carrier is from about 10:1 to about 60:1, for example from about 20:1 to about 30:1.

[0785] Embodiment 93. The pharmaceutical composition according to any one of embodiments 77 to 92, wherein the N/P ratio of the lipid-based carrier encapsulating the nucleic acid is in a range from about 1 to about 10, for example in a range from about 5 to about 7.

[0786] Embodiment 94. The pharmaceutical composition according to any one of embodiments 77 to 93, wherein the lipid-based carrier has a Z-average size in a range of about 50 nm to about 120 nm.

[0787] Embodiment 95. The pharmaceutical composition according to any one of embodiments 75 to 94, additionally comprising at least one antagonist of at least one RNA sensing pattern recognition receptor selected from a Toll-like receptor, for example a TLR7 antagonist and/or a TLR8 antagonist.

[0788] Embodiment 96. The pharmaceutical composition according to any one of embodiments 75 to 95, wherein the composition is a liquid composition or a dried composition.

[0789] Embodiment 97. A vaccine comprising the coding RNA according to any one of embodiments 1 to 74, or the pharmaceutical composition according to any one of embodiments 75 to 96.

[0790] Embodiment 98. The vaccine according to embodiment 97, wherein the vaccine, for example the administration of the vaccine to a subject, elicits a humoral immune response against E. coli, FimH.

[0791] Embodiment 99. The vaccine according to embodiments 97 or 98, wherein the vaccine, for example the administration of the vaccine to a subject, elicits neutralizing antibody titers against E. coli, optionally wherein said antibodies are IgG antibodies. In one embodiment, said antibodies are against E. coli FimH. In one embodiment, the vaccine, for example the administration of the vaccine to a subject, elicits neutralizing antibody titers against E. coli, for example against E. coli FimH, in the urine of a subject upon administration of the vaccine.

[0792] Embodiment 100. A Kit or kit of parts, comprising the coding RNA according to any one of embodiments 1 to 74, the pharmaceutical composition according to any one of embodiments 75 to 96, and/or the vaccine according to any one of embodiments 97 to 99, optionally comprising a liquid vehicle for solubilising, and, optionally, technical instructions providing information on administration and dosage of the components.

[0793] Embodiment 101. The coding RNA according to any one of embodiments 1 to 74, the pharmaceutical composition according to any one of embodiments 75 to 96, the vaccine according to any one of embodiments 97 to 99, or the kit or kit of parts according to embodiment 100, for use as a medicament.

[0794] Embodiment 102. The coding RNA according to any one of embodiments 1 to 74, the pharmaceutical composition according to any one of embodiments 75 to 96, the vaccine according to any one of embodiments 97 to 99, or the kit or kit of parts according to embodiment 100, for use for treating or preventing one or more symptoms associated with urinary tract infections (UTI) in a subject in need thereof.

[0795] Embodiment 103. The coding RNA according to any one of embodiments 1 to 74, the pharmaceutical composition according to any one of embodiments 75 to 96, the vaccine according to any one of embodiments 97 to 99, or the kit or kit of parts according to embodiment 100, for use for treating or preventing a disease caused by E. coli.

[0796] Embodiment 104. A method of treating or preventing a disorder, wherein the method comprises administering to a subject in need thereof an effective amount of the coding RNA according to any one of embodiments 1 to 74, the pharmaceutical composition according to any one of embodiments 75 to 96, the vaccine according to any one of embodiments 97 to 99, or the kit or kit of parts according to embodiment 100.

[0797] Embodiment 105. The method according to embodiment 104, wherein the method elicits a humoral immune response against E. coli FimH, optionally wherein the method elicits a humoral immune response in the urine of the subject.

[0798] Embodiment 106. The method according to embodiments 104 or 105, wherein the method elicits neutralizing antibody titers against E. coli, optionally wherein said antibodies are IgG antibodies.

[0799] Embodiment 107. The method according to embodiment 106, wherein the method elicits neutralizing antibody titers against E. coli, for example against E. coli FimH, in the urine of the subject.

[0800] Embodiment 108. The method according to any one of embodiments 104 to 107, wherein the method elicits antibodies which are capable of inhibiting bacterial adhesion.

[0801] Embodiment 109. The method according to any one of embodiments 104 to 108, wherein the administration is an intramuscular administration.

[0802] Embodiment 110. Use of the coding RNA according to any one of embodiments 1 to 74, the pharmaceutical composition according to any one of embodiments 75 to 96, the vaccine according to any one of embodiments 97 to 99, or the kit or kit of parts according to embodiment 100 for the manufacture of a medicament for raising an immune response in a mammal, for example, for treating and/or preventing a disease, for example an E. coli infection.

### EXAMPLES

[0803] In the following, particular examples illustrating various embodiments and aspects of the disclosure are presented. However, the present disclosure shall not to be limited in scope by the specific embodiments described herein. The following preparations and examples are given to enable those skilled in the art to more clearly understand and to practice the present disclosure. The present disclosure, however, is not limited in scope by the exemplified embodiments, which are intended as illustrations of single aspects of the disclosure only, and methods, which are functionally equivalent are within the scope of the disclosure. Indeed, various modifications of the disclosure in addition to those described herein will become readily apparent to those skilled in the art from the foregoing description, accompanying figures and the examples below. All such modifications fall within the scope of the appended claims.

### Example 1: Preparation of DNA and RNA Constructs, Compositions, and Vaccines

[0804] The present Example provides methods of obtaining the coding RNA of the disclosure as well as methods of generating a composition or a vaccine of the disclosure.

### 1.1. Preparation of DNA and RNA Constructs

[0805] DNA sequences encoding different E. coli FimH protein designs were prepared and used for subsequent RNA in vitro transcription reactions. Said DNA sequences were prepared by modifying the wild type or reference encoding DNA sequences by introducing a G/C optimized or modified coding sequence (e.g., “cds opt1”) for stabilization and expression optimization. Sequences were introduced into a pUC derived DNA vector to comprise stabilizing 3′-UTR sequences and 5′-UTR sequences, additionally comprising a stretch of adenosines (e.g. A100), and optionally a histone stem-loop (hSL) structure (see Table 3, for an overview of antigen designs see Table 1).

[0806] The obtained plasmid DNA constructs were transformed and propagated in bacteria using common protocols known in the art. Eventually, the plasmid DNA constructs were extracted, purified, and used for subsequent RNA in vitro transcription (see section 1.2.).

1.2. RNA In Vitro Transcription from Plasmid DNA Templates

[0807] DNA plasmids prepared according to section 1.1 were enzymatically linearized using a restriction enzyme and used for DNA dependent RNA in vitro transcription using T7 RNA polymerase in the presence of a sequence optimized nucleotide mixture (ATP/GTP/CTP/UTP) and cap analog (for cap1: m7G(5′)ppp(5′)(2′OMeA)pG; TriLink) under suitable buffer conditions. The obtained RNA constructs were purified using RP-HPLC (PureMessenger®, CureVac AG, Tübingen, Germany; WO2008077592) and used for in vitro and in vivo experiments. To obtain chemically modified mRNA, RNA in vitro transcription was performed in the presence of a modified nucleoside mixture comprising N1-methylpseudouridine (m1ψ) or pseudouridine (ψ) instead of uridine. The obtained m1ψ or ψ chemically modified RNA was purified using RP-HPLC (PureMessenger®, CureVac AG, Tübingen, Germany; WO2008077592) and used for further experiments.

[0808] RNA for clinical development is produced under current good manufacturing practice e.g. according to WO2016180430, implementing various quality control steps on DNA and RNA level.

### The RNA Constructs of the Examples

[0809] The generated RNA sequences/constructs are provided in Table 3 with the encoded antigenic protein and the respective UTR elements indicated therein. If not indicated otherwise, the RNA sequences/constructs of Table 3 have been produced using RNA in vitro transcription in the presence of a m7G(5′)ppp(5′)(2′OMeA)pG cap analog; accordingly, the RNA sequences/constructs comprise a 5′ cap1 structure. If not indicated otherwise, the RNA sequences/constructs of Table 3 have been produced in the absence of chemically modified nucleotides (e.g. pseudouridine (ψ) or N1-methylpseudouridine (m1ψ)).

TABLE 3
RNA constructs encoding the antigen designs used in the examples

| Construct | | | 5′-UTR/ | | SEQ | | |
|---|---|---|---|---|---|---|---|
| # (RNA | | CDS | 3′-UTR; | 3′- | ID NO: | SEQ ID | SEQ ID |
| ID) | Description | opt. | UTR Design | end | Protein | NO: CDS | NO: RNA |
| 1 | Ec(J96)-FimC(1- | opt1 | HSD17B4/ | hSL- | 496 | 521 | 671 |
| (R10388) | 36)_Ec(J96)-FimC(37-241) | (gc) | PSMB3; | A100 | | | |
| | | | a-1 | | | | |
| 2 | HsIgE(1-18)_Ec(J96)- | opt1 | HSD17B4/ | hSL- | 497 | 522 | 672 |
| (R10389) | FimC(37-241) | (gc) | PSMB3; | A100 | | | |
| | | | a-1 | | | | |
| 3 | Ec(J96)-FimH(1- | opt1 | HSD17B4/ | hSL- | 498 | 523 | 673 |
| (R10390) | 21)_Ec(J96)-FimH(22-300) | (gc) | PSMB3; | A100 | | | |
| | | | a-1 | | | | |
| 4 | HsIgE(1-18)_Ec(J96)- | opt1 | HSD17B4/ | hSL- | 499 | 524 | 674 |
| (R10391) | FimH(22-300) | (gc) | PSMB3; | A100 | | | |
| | | | a-1 | | | | |
| 5 | MmIgK(1-20)_Ec(J96)- | opt1 | HSD17B4/ | hSL- | 500 | 525 | 675 |
| (R10392) | FimH(22-300) | (gc) | PSMB3; | A100 | | | |
| | | | a-1 | | | | |
| 6 | Ec(J96)-FimH(1- | opt1 | HSD17B4/ | hSL- | 501 | 526 | 676 |
| (R10393) | 21)_Ec(J96)-FimH(22- | (gc) | PSMB3; | A100 | | | |
| | 300)_Linker- | | a-1 | | | | |
| | PGDGN_Ec(J96)-FimG(24- | | | | | | |
| | 37) | | | | | | |
| 7 | HsIgE(1-18)_Ec(J96)- | opt1 | HSD17B4/ | hSL- | 502 | 527 | 677 |
| (R10394) | FimH(22-300)_Linker- | (gc) | PSMB3; | A100 | | | |
| | PGDGN_Ec(J96)-FimG(24- | | a-1 | | | | |
| | 37) | | | | | | |
| 8 | HsIgE(1-18)_Ec(J96)- | opt1 | HSD17B4/ | hSL- | 503 | 528 | 678 |
| (R10395) | FimH(22-300)_Linker- | (gc) | PSMB3; | A100 | | | |
| | G4SGG_Ec(J96)-FimG(24- | | a-1 | | | | |
| | 37) | | | | | | |
| 9 | MmIgK(1- | opt1 | HSD17B4/ | hSL- | 504 | 529 | 679 |
| (R10396) | 20)_Ec(J96)FimH(22- | (gc) | PSMB3; | A100 | | | |
| | 300)_Linker- | | a-1 | | | | |
| | PGDGN_Ec(J96)-FimG(24- | | | | | | |
| | 37) | | | | | | |
| 9 | MmIgK(1- | opt1 | HSD17B4/ | hSL- | 504 | 529 | 829, |
| (R10949*, | 20)_Ec(J96)FimH(22- | (gc) | PSMB3; | A100 | | | 1271, |
| R10950*) | 300)_Linker- | | a-1 | | | | 1274 |
| | PGDGN_Ec(J96)-FimG(24- | | | | | | |
| | 37) | | | | | | |
| 10 | MmIgK(1- | opt1 | HSD17B4/ | hSL- | 505 | 530 | 680 |
| (R10397) | 20)_Ec(536)FimH(22- | (gc) | PSMB3; | A100 | | | |
| | 300)_Linker- | | a-1 | | | | |
| | PGDGN_Ec(J96)-FimG(24- | | | | | | |
| | 37) | | | | | | |
| 11 | HsIgE(1- | opt1 | HSD17B4/ | hSL- | 506 | 531 | 681 |
| (R10398) | 18)_Ec(J96)FimH(22- | (gc) | PSMB3; | A100 | | | |
| | 300)_Linker- | | a-1 | | | | |
| | (G4S)3_Ec(J96)-FimC(135- | | | | | | |
| | 148) | | | | | | |
| 12 | LumSynth(1- | opt1 | HSD17B4/ | hSL- | 507 | 532 | 682 |
| (R10399) | 154_C37A_N102D)_Linker- | (gc) | PSMB3; | A100 | | | |
| | (GGS)4-GGG_Ec(J96)- | | a-1 | | | | |
| | FimH(22-300)_Linker- | | | | | | |
| | PGDGN_Ec(J96)-FimG(24- | | | | | | |
| | 37) | | | | | | |
| 13 | HsIgE(1-18)_Ec(J96)- | opt1 | HSD17B4/ | hSL- | 508 | 533 | 683 |
| (R10400) | FimH(22-300)_Linker- | (gc) | PSMB3; | A100 | | | |
| | PGDGN_Ec(J96)-FimG(24- | | a-1 | | | | |
| | 37)_Linker- | | | | | | |
| | SGG_LumSynth(1- | | | | | | |
| | 154_C37A_N102D) | | | | | | |
| 13 | HsIgE(1-18)_Ec(J96)- | opt1 | HSD17B4/ | hSL- | 508 | 533 | 833, |
| (R10951*, | FimH(22-300)_Linker- | (gc) | PSMB3; | A100 | | | 1272, |
| R10952*) | PGDGN_Ec(J96)-FimG(24- | | a-1 | | | | 1275 |
| | 37)_Linker- | | | | | | |
| | SGG_LumSynth(1- | | | | | | |
| | 154_C37A_N102D) | | | | | | |
| 14 | HsIgE(1-18)_Ec(J96)- | opt1 | HSD17B4/ | hSL- | 509 | 534 | 684 |
| (R10401) | FimH(22-300)_Linker- | (gc) | PSMB3; | A100 | | | |
| | PGDGN_Ec(J96)-FimG(24- | | a-1 | | | | |
| | 37)_Linker-SGG_Ferritin(5- | | | | | | |
| | 167_N19Q) | | | | | | |
| 14 | HsIgE(1-18)_Ec(J96)- | opt1 | HSD17B4/ | hSL- | 509 | 534 | 834, |
| (R10953*, | FimH(22-300)_Linker- | (gc) | PSMB3; | A100 | | | 1273, |
| R10954*) | PGDGN_Ec(J96)-FimG(24- | | a-1 | | | | 1276 |
| | 37)_Linker-SGG_Ferritin(5- | | | | | | |
| | 167_N19Q) | | | | | | |
| 15 | MmIgK(1-20)_Ec(J96)- | opt1 | HSD17B4/ | hSL- | 510 | 535 | 685 |
| (R10402) | FimH(22-300)_Linker- | (gc) | PSMB3; | A100 | | | |
| | PGDGN_Ec(J96)-FimG(24- | | a-1 | | | | |
| | 37)_Linker- | | | | | | |
| | (GGS)4_Ferritin(5-166) | | | | | | |
| 16 | HsIgE(1-18)_Ec(J96)- | opt1 | HSD17B4/ | hSL- | 511 | 536 | 686 |
| (R10403) | FimH(22-300)_Linker- | (gc) | PSMB3; | A100 | | | |
| | PGDGN_Ec(J96)-FimG(24- | | a-1 | | | | |
| | 37)_TMdomain-HA(510- | | | | | | |
| | 566) | | | | | | |

*mRNA R10949, R10951 and R10953 were produced with pseudouridine (ψ); R10950, R10952 and R10954 were produced with N1-methylpseudouridine (m1ψ).
Ec: Escherichia coli; HA: Hemagglutinin; Hs: Homo sapiens; IgE: immunoglobulin E; IgK: immunoglobulin Kappa; LumSynth, LS: Lumazine synthase; Mm: Mus musculus; TMdomain, TM: transmembrane domain.

1.4. Preparation of a LNP Formulated mRNA Composition

[0810] LNPs were prepared using cationic lipids, structural lipids, a PEG-lipid, and cholesterol. Lipid solution (in ethanol) was mixed with RNA solution (aqueous buffer) using a microfluidic mixing device. Obtained LNPs were re-buffered in a carbohydrate buffer via dialysis, and up-concentrated to a target concentration using ultracentrifugation tubes. LNP-formulated mRNA was stored at −80° C. prior to use in in vitro or in vivo experiments.

[0811] Suitably, lipid nanoparticles were prepared and tested according to the general procedures described in POT Pub. Nos. WO2015199952, WO2017004143 and WO2017075531, the full disclosures of which are incorporated herein by reference. Lipid nanoparticle (LNP)-formulated mRNA was prepared using an ionizable amino lipid (cationic lipid), phospholipid, cholesterol and a PEGylated lipid. LNPs were prepared as follows. Cationic lipid according to formula III-3 (ALC-0315), DSPC, cholesterol and PEG-lipid according to formula IVa (ALC-0159) were solubilized in ethanol at a molar ratio of approximately 47.5:10:40.8:1.7 (see Table 4). Lipid nanoparticles (LNP) comprising compound Rai-3 were prepared at a ratio of mRNA (sequences see Table 3) to total lipid of 0.03-0.04 w/w. Briefly, the mRNA was diluted to 0.05 to 0.2 mg/ml in 10 to 50 mM citrate buffer, pH 4. Pumps were used to mix the ethanolic lipid solution with the mRNA aqueous solution at a ratio of about 1:5 to 1:3 (vol/vol) with total flow rates above 15 ml/min. The ethanol was then removed and the external buffer replaced with PBS. Finally, the lipid nanoparticles were filtered through a 0.2 μm pore sterile filter. Lipid nanoparticle particle diameter size was 50-120 nm as determined by quasi-elastic light scattering using a Malvern Zetasizer Nano (Malvern, UK).

TABLE 4
Lipid-based carrier composition of the examples

| | | Ratio | | |
|---|---|---|---|---|
| | Compounds | (mol %) | Structure | Mass |
| 1 | Cholesterol | 40.9 | [chemical structure] | 386.4 |
| 2 | 1,2-distearoylsn- glycero-3- phosphocholine (DSPC) | 10 | [chemical structure] | 789.6 |
| 3 | Cationic Lipid | 47.4 | [chemical structure] | 765.7 |
| 4 | PEG Lipid | 1.7 | [chemical structure] | 2010.1 |

1.5. Preparation of Combination mRNA Vaccines Comprising Antigen Combinations (Bivalent or Multivalent Vaccine Compositions):

[0812] Combination mRNA vaccines were formulated with LNPs either in a separate or co-formulated way. For separately mixed or formulated mRNA vaccines, each mRNA component was prepared and separately LNP formulated as described in Example 1.4, followed by mixing of the different LNP-formulated components. For co-formulated mRNA vaccine, the different mRNA components were firstly mixed together, followed by a co-formulation in LNPs as described in Example 1.4.

### Example 2: Analysis of E. coli FimH Antigen Designs

### 2.1 In Vitro Analysis of Expression and Secretion of Antigen Designs Using Western Blot

[0813] To determine the in vitro protein expression of some of the mRNA constructs, HeLa cells were transfected with 2 μg unformulated mRNA encoding different antigen designs using Lipofectamine 2000 and 6-well plates. 24 h after transfection, cell lysates and cell culture supernatants were subjected to SDS-PAGE and Western blot analysis using mouse anti-FimC serum (1:1000), mouse anti-FimHLcys serum (1:1000) or rabbit anti-alpha-tubulin antibody (1:1000; Cell Signaling) as primary antibodies as well as goat anti-rabbit IgG IRDye®680RD antibody (1:10000; Li-Cor) or goat anti-mouse IgG IRDye® 800CW antibody (1:10000; Li-Cor) as secondary antibodies. Anti-FimC serum and anti-FimHLcys sera were obtained by immunizing CD1 mice subcutaneously on days 0, 21 and 35 and collecting sera at day 49. FimHLcys was obtained as described in Kisiela D I, et al. Proc Natl Acad Sci USA. 2013 Nov. 19; 110(47):19089-94. Detection and quantification was performed using a Li-Cor detection system (Odyssey CLx image system) in combination with Image Studio Lite software. Table 5 contains mRNA constructs that were used in the experiment and the result of the experiment is shown in FIG. 1.

TABLE 5
mRNA constructs used for Western blot analysis (Example 2.1)

| | | | Pre- | |
|---|---|---|---|---|
| | | | dicted | |
| | | Predicted | size in | |
| | | size in | kDa | SEQ |
| Construct | | kDa with | w/o | ID |
| # | | signal | signal | NO: |
| (RNA ID) | Antigen design | peptide | peptide | RNA |
| Negative | WFI (water for injection) | — | — | — |
| control | | | | |
| Protein | Recombinant FimC | 22.7 (FimC) | | — |
| | or FimHL protein | 16.9 (FimHL) | | |
| | (100 ng loaded on | | | |
| | each gel) | | | |
| 1 | Ec(J96)-FimC(1-36)_Ec(J96)- | 26.6 | 22.7 | 671 |
| (R10388) | FimC(37-241) | | | |
| 2 | HslgE(1-18)_Ec(J96)- | 24.8 | 22.7 | 672 |
| (R10389) | FimC(37-241) | | | |
| 3 | Ec(J96)-FimH(1-21)_Ec(J96)- | 31.5 | 29.1 | 673 |
| (R10390) | FimH(22-300) | | | |
| 4 | HslgE(1-18)_Ec(J96)- | 31.2 | 29.1 | 674 |
| (R10391) | FimH(22-300) | | | |
| 5 | MmlgK(1-20)_Ec(J96)- | 31.3 | 29.1 | 675 |
| (R10392) | FimH(22-300) | | | |
| 6 | Ec(J96)-FimH(1-21)_Ec(J96)- | 33.3 | 30.9 | 676 |
| (R10393) | FimH(22-300)_Linker- | | | |
| | PGDGN_Ec(J96)-FimG(24-37) | | | |
| 7 | HslgE(1-18)_Ec(J96)-FimH(22- | 33.0 | 30.9 | 677 |
| (R10394) | 300)_Linker-PGDGN_Ec(J96)- | | | |
| | FimG(24-37) | | | |
| 8 | HslgE(1-18)_Ec(J96)-FimH(22- | 33.0 | 30.9 | 678 |
| (R10395) | 300)_Linker-G4SGG_Ec(J96)- | | | |
| | FimG(24-37) | | | |
| 9 | MmlgK(1-20)_Ec(J96)- | 33.1 | 30.9 | 679 |
| (R10396) | FimH(22-300)_Linker- | | | |
| | PGDGN_Ec(J96)- | | | |
| | FimG(24-37) | | | |
| 10 | MmlgK(1-20)_Ec(536)- | 33.1 | 30.9 | 680 |
| (R10397) | FimH(22-300)_Linker- | | | |
| | PGDGN_Ec(J96)- | | | |
| | FimG(24-37) | | | |
| 11 | HslgE(1-18)_Ec(J96)- | 33.7 | 31.6 | 681 |
| (R10398) | FimH(22-300)_Linker- | | | |
| | (G4S)3_Ec(J96)- | | | |
| | FimC(135-148) | | | |
| 12 | LumSynth(1- | — | 48.5 | 682 |
| (R10399) | 154_C37A_N102D)_ | | | |
| | Linker-(GGS)4- | | | |
| | GGG_Ec(J96)- | | | |
| | FimH(22-300)_Linker- | | | |
| | PGDGN_Ec(J96)-FimG(24-37) | | | |
| 13 | HslgE(1-18)_Ec(J96)-FimH(22- | 49.9 | 47.8 | 683 |
| (R10400) | 300)_Linker-PGDGN_Ec(J96)- | | | |
| | FimG(24-37)_Linker- | | | |
| | SGG_LumSynth(1- | | | |
| | 154_C37A_N102D) | | | |
| 14 | HslgE(1-18)_Ec(J96)-FimH(22- | 52.1 | 50.0 | 684 |
| (R10401) | 300)_Linker-PGDGN_Ec(J96)- | | | |
| | FimG(24-37)_Linker- | | | |
| | SGG_Ferritin(5- | | | |
| | 167_N19Q) | | | |
| 15 | MmlgK(1-20)_Ec(J96)- | 52.7 | 50.5 | 685 |
| (R10402) | FimH(22-300)_Linker- | | | |
| | PGDGN_Ec(J96)- | | | |
| | FimG(24-37)_Linker- | | | |
| | (GGS)4_Ferritin(5-166) | | | |
| 16 | HslgE(1-18)_Ec(J96)-FimH(22- | 39.3 | 37.2 | 686 |
| (R10403) | 300)_Linker-PGDGN_Ec(J96)- | | | |
| | FimG(24-37)_ | | | |
| | TMdomain-HA(510-566) | | | |

Ec: Escherichia coli; HA: Hemagglutinin; Hs: Homo sapiens; IgE: immunoglobulin E; IgK: immunoglobulin Kappa; LumSynth, LS: Lumazine synthase; Mm: Mus musculus; TMdomain, TM: transmembrane domain.

### Results:

[0814] Expression was demonstrated for most of the RNA constructs in the corresponding cell lysates (see FIG. 1A). Secretion of the tested E. coli FimH antigen designs was detected for constructs 1, 2, 3, 6, 7, 8, 9, 10 and 11 by analyzing the supernatant of transfected HeLa cells (see FIG. 1B).

### 2.2 Analysis of Immunogenicity of E. Coli FimH Antigen Designs in Mice

[0815] mRNA constructs encoding E. coli FimH antigen designs (see Table 5) were prepared according to Example 1. The mRNA was formulated with Lipid-based carrier (see Example 1.4. Preparation of a LNP formulated mRNA composition). The different mRNA vaccine candidates were applied to female BALE/c mice on day 0, 21, and 35 and were administered intramuscularly (i.m.) with 2 μg or 4 μg of RNA as shown in Table 6. A negative control group (A) received just buffer (0.9% NaCl) and one group (B) received a PHAD-adjuvanted FimHC protein complex subunit vaccine, which was obtained as described in U.S. Pat. No. 9,017,698. Serum and urine samples were taken at day 1 (18 h), 21, 35, and 49 for determination of humoral immune responses.

[0816] ELISA was performed using recombinant FimHL for coating. FimHL was obtained by cloning amino acids 22-181 of UPEC J96 FimH (GenBank: ELL41155.1) into Pet22b plasmid. Recombinant FimHL was expressed in E. coli BL21-DE3 and purified from the periplasmic space. Coated plates were incubated using respective serum or urine dilutions, and binding of specific antibodies to FimHL was detected using Peroxidase-conjugated goat anti-mouse IgG (H+L) antibody (1:5000, Jackson ImmunoResearch) followed by Amplex® UltraRed reagent (1:200, Invitrogen) as substrate. Endpoint titers of IgG antibody directed against the recombinant protein FimHL were measured by ELISA on day 21, 35, and 49

TABLE 6
Vaccination regimen (Example 2.2)

| | No. | | | | | | Immu- | | |
|---|---|---|---|---|---|---|---|---|---|
| | of | Construct # | | | | | nisation | | SEQ ID |
| Group | mice | (RNA ID) | | Dose | | Route | schedule | Samples | NO: RNA |
| A | 8 | Buffer (0.9% | | 25 | μl | i.m. | D 0 | Serum: | — |
| | | NaCl) | | | | M. tibialis | D 21 | D 1 (18 h) | |
| B | 8 | PHAD- | | 2 | μg | 2 × 25 μl | D 35 | D 21 | — |
| | | adjuvanted | | | | (protein) | | D 35 | |
| | | FimHC protein | | | | 1 × 25 μl | | D 49 | |
| | | complex | | | | (mRNA) | | Urine: | |
| | | subunit vaccine | | | | | | D 21 | |
| C | 8 | 1 | (R10388) + | 2 | μg + | | | D 35 | 671 + |
| | | 3 | (R10390) | 2 | μg | | | D 49 | 673 |
| D | 8 | 2 | (R10389) + | 2 | μg + | | | Splenocytes: | 672 + |
| | | 5 | (R10392) | 2 | μg | | | D 49 | 675 |
| E | 8 | 3 | (R10390) | 2 | μg | | | | 673 |
| F | 8 | 4 | (R10391) | 2 | μg | | | | 674 |
| G | 8 | 5 | (R10392) | 2 | μg | | | | 675 |
| H | 8 | 6 | (R10393) | 2 | μg | | | | 676 |
| I | 8 | 7 | (R10394) | 2 | μg | | | | 677 |
| J | 8 | 8 | (R10395) | 2 | μg | | | | 678 |
| K | 8 | 9 | (R10396) | 2 | μg | | | | 679 |
| L | 8 | 10 | (R10397) | 2 | μg | | | | 680 |
| M | 8 | 11 | (R10398) | 2 | μg | | | | 681 |
| N | 8 | 12 | (R10399) | 2 | μg | | | | 682 |
| O | 8 | 13 | (R10400) | 2 | μg | | | | 683 |
| P | 8 | 14 | (R10401) | 2 | μg | | | | 684 |
| Q | 8 | 15 | (R10402) | 2 | μg | | | | 685 |
| R | 8 | 16 | (R10403) | 2 | μg | | | | 686 |

Detailed antigen design of constructs/RNA IDs or SEQ ID NOs is shown in Table 3 (Example 1).

### Results:

[0817] As shown in FIG. 2, the tested antigen designs induced substantial humoral immune responses in mice. FimHL-specific IgG endpoint titers (analyzed via ELISA) were detectable for most groups in serum and urine at day 21, 35 and 49. Early immune responses are very important for a fast and robust protection against UTIs. Although adaptive immune responses were already quite high after one vaccination, serum and urine antibody titers induced by vaccination with RNA vaccines or by the PHAD-adjuvanted FimHC protein complex subunit vaccine can be further increased by a second and third vaccination.

2.3 Analysis of Functional Serum Antibody Responses Against E. coli FimH Antigen Designs

[0818] The antibody response generated by immunisation with the E. coli FimH constructs as described in Example 2.2 was characterised by the inhibition of bacterial adhesion assay (BAI). BAI titres were determined using sera pools (8 mice per group) at day 21, 35 and 49 timepoints.

### Inhibition of Bacterial Adhesion Assay (BAI)

[0819] An UTI89 E. coli UPEC strain was engineered to express the mCherry fluorescent marker and was cultivated for 3 passages in static liquid culture. Bacteria were harvested, washed with PBS and resuspended at 0.012 OD₆₀₀/ml with F12K medium (Thermo Scientific) supplemented with 10% FBS without antibiotics.

[0820] Serum samples were prepared in with F12K medium or F12K supplemented with 10% FBS at a concentration twice with respect to the final working concentration (2×), and further diluted with serial dilutions. 20% D-(+)-Mannose and F12K medium supplemented with 10% FBS without antibiotics were used as positive and negative controls, respectively.

[0821] SV-HUC cells (ATCC) were cultivated in F12K medium (Thermo Scientific) supplemented with 10% FBS and antibiotics. SV-HUC cells were seeded in 96-well plates at a density of 3.5×10⁴ cells/well (final volume of 200 μl/well) and incubated at 37° C., 5% CO₂. The medium was exchanged with F12K medium supplemented with 10% FBS without antibiotics. The medium was removed and 50 μl of samples or controls were added to each well followed by 50 μl 2× bacteria inoculum or medium, as negative control. Plates were incubated for 30 minutes and serum dilution from 15% to 0.06% was added. Plates were incubated at 37° C., 5% CO₂, for 30 min and the medium was removed and the wells were washed with PBS for three times. Bacteria were fixed using 4% formaldehyde solution for 20 min, and subsequently stained with DAPI (62248, ThermoScientific) as known in the art. Microscopy analysis was performed on OPERA Phenix. Data were analysed with Harmony software. Total bacterial fluorescence area (single object ≤100 μm²) was calculated as a value of adherence. The titer for each sample was computed as the dilution corresponding to the inflection point of the dose-response curve.

### Results:

[0822] As shown in Table 7, BAI titers were detected for almost all samples at day 21. Higher inhibition titers were detected for constructs 13, 14 and 15, which encode an antigen clustering domain. A specific titer was not assigned at d21 for PHAD-adjuvanted FimHC protein complex in both the assays because below the limit of quantification, while it raised at d35 and d49. Construct 12 was below the limit of quantification for all the three timepoints. A plateau of the response was reached for most samples at day 35, as no further increase was observed at day 49. The trend observed in the BAI titers was similar to the IgG titers measured by ELISA:

TABLE 7
BAI titers of serum antibody responses against E. coli
FimH antigen designs (Example 2.3)

| Construct # | | Immunization | | | |
|---|---|---|---|---|---|
| (RNA ID) | Dose | Group | d21 | d35 | d49 |
| Negative control | 100 μl | A | — | NR | — |
| PHAD-adjuvanted | 2 μg | B | NR | 5 | 5 |
| FimHC protein | | | | | |
| complex | | | | | |
| subunit vaccine | | | | | |
| 1 (R10388) + 3 | 2 μg + | C | — | — | — |
| (R10390) | 2 μg | | | | |
| 2 (R10389) + 5 | 2 μg + | D | NR | 90 | 56 |
| (R10392) | 2 μg | | | | |
| 3 (R10390) | 2 μg | E | 6 | 220 | — |
| 4 (R10391) | 2 μg | F | 2 | 22 | — |
| 5 (R10392) | 2 μg | G | 3 | 132 | — |
| 6 (R10393) | 2 μg | H | 3 | 157 | — |
| 7 (R10394) | 2 μg | I | 4 | 127 | — |
| 8 (R10395) | 2 μg | J | 2 | 299 | — |
| 9 (R10396) | 2 μg | K | 3 | 373 | 354 |
| 10 (R10397) | 2 μg | L | — | — | — |
| 11 (R10398) | 2 μg | M | 3 | 106 | — |
| 12 (R10399) | 2 μg | N | NR | NR | — |
| 13 (R10400) | 2 μg | O | 10 | 230 | 292 |
| 14 (R10401) | 2 μg | P | 18 | 251 | 834 |
| 15 (R10402) | 2 μg | Q | 11 | 133 | 207 |
| 16 (R10403) | 2 μg | R | 3 | 100 | — |

NR (not responder) indicates tested sample lower than the limit of quantification, “—” indicates that the assay was not performed.

2.4 Analysis of T-Cell Responses of E. coli FimH Antigen Designs Using Intracellular Cytokine Staining (ICS) and FACS

[0823] Splenocytes from vaccinated and control mice were isolated on day 49 according to a standard protocol known in the art. Briefly, isolated spleens were grinded through a cell strainer and washed in PBS/1% FBS followed by red blood cell lysis. After an extensive washing step with PBS/1% FBS, splenocytes were seeded into 96-well plates (2×10⁶ cells per well). Cells were stimulated with a mixture of FimH protein specific peptides (1 μg/ml each) in the presence of 2.5 μg/ml of an anti-CD28 antibody, an anti-CD107a PE-Cy7 antibody (1:100) and a protein transport inhibitor (BD Biosciences) for 6 hours at 37° C. After stimulation, cells were washed and stained for intracellular cytokines using the Cytofix/Cytoperm solution (BD Biosciences) according to the manufacturer's instructions. The following antibodies were used for staining: anti-Thy1.2 FITC (1:200, Biolegend), anti-CD8 APC-H7 (1:200, BD Biosciences), anti-CD4 BD Horizon™ V450 (1:200, BD Biosciences), anti-TNFa PE (1:100, eBioscience), anti-IFNg APC (1:100, BD Biosciences) and incubated with Fc-block diluted 1:100. Aqua Dye was used to distinguish live/dead cells (Invitrogen). Cells were acquired using a ZE5 flow cytometer (Bio-Rad). Flow cytometry data was analyzed using FlowJo software package (Tree Star, Inc.). Table 6 (Vaccination regimen of Example 2.2) contains mRNA constructs that were used in the experiment and the result of the experiment is shown in FIG. 3.

### Results:

[0824] As shown in FIG. 3, most of the LNP formulated ExPEC FimH vaccines led to a significant induction of cellular immune responses with detectable frequencies of FimH-specific CD4+ T helper cells and CD8+ cytotoxic T cells producing IFN-gamma and TNF two weeks after the third vaccination on day 49, while there were no measurable T cell responses for the PHAD-adjuvanted FimHC protein complex.

### Example 3: Analysis of E. coli FimH Designs in Rats

3.1 In Vivo Analysis of Immunogenicity of E. coli FimH Designs

[0825] mRNA constructs encoding E. coli FimH designs (see Table 3) were prepared according to Example 1. The mRNA was formulated with Lipid-based carrier (see Example 1.4. Preparation of a LNP formulated mRNA composition). The different mRNA vaccine candidates were applied to female Wistar rats on day 0, 21, and 35 and were administered intramuscularly (i.m.) with 1 μg, 4 μg or 12 μg of RNA as shown in Table 8. A negative control group (A) received just buffer (0.9% NaCl) and three groups (B, C, D) received an AS01-adjuvanted FimHdG protein subunit vaccine (0.71 μg, 2.83 μg or 8.49 μg), which was obtained by cloning in the pET24b (+) vector a sequence corresponding to SEQ ID NO: 504 (without a signal peptide). Recombinant FimHdG was expressed in E. coli and purified from inclusion bodies using techniques known in the art. Serum and urine samples were taken at day 1 (18 h), 21, 35, and 49 for determination of humoral immune responses.

[0826] ELISA was performed using recombinant protein FimHL for coating as described in Example 2.2. Coated plates were incubated using respective serum or urine dilutions, and binding of specific antibodies to the respective recombinant protein FimHL was detected using goat anti-rat IgG (whole molecule)-Peroxidase antibody (1:5000, Sigma-Aldrich) followed by Amplex® UltraRed reagent (1:200, Invitrogen) as substrate. Endpoint titers of IgG antibody directed against the recombinant protein FimHL were measured by ELISA on day 21, 35, and 49.

TABLE 8
Vaccination regimen (Example 3.1)

| | No. | | | | | Immu- | | |
|---|---|---|---|---|---|---|---|---|
| | of | Construct # | | | | nisation | | SEQ ID |
| Group | rats | (RNA ID) | Dose | | Route | schedule | Samples | NO: RNA |
| A | 7 | Buffer | 100 | μl | i.m. | D 0 | Serum: | — |
| | | (0.9% NaCl) | | | M. | D 21 | D 1 (18 h) | |
| B | 7 | | 0.7 | μg | gastrocnemius | D 35 | D 21 | — |
| C | 7 | | 2.8 | μg | 1 × 100 μl | | D 35 | |
| | | | | | (protein) | | D 49 | |
| D | 7 | AS01-adjuvanted | 8.5 | μg | 1 × 100 μl | | Urine: | |
| | | FimHdG | | | (mRNA) | | D 21 | |
| | | subunit vaccine | | | | | D 35 | |
| E | 7 | 9 | 1 | μg | | | D 49 | 679 |
| F | 7 | (R10396) | 4 | μg | | | Splenocytes: | |
| G | 7 | | 12 | μg | | | D 49 | |
| H | 7 | 13 | 1 | μg | | | | 683 |
| I | 7 | (R10400) | 4 | μg | | | | |
| J | 7 | | 12 | μg | | | | |
| K | 7 | 14 | 1 | μg | | | | 684 |
| L | 7 | (R10401) | 4 | μg | | | | |
| M | 7 | | 12 | μg | | | | |

Detailed antigen design of constructs/RNA IDs or SEQ ID NOs is shown in Table 3 (Example 1).

### Results:

[0827] As shown in FIG. 4, the different antigen designs induced substantial humoral immune responses in a dose dependent manner in Wistar rats. FimHL-specific IgG endpoint titers (analyzed via ELISA) were detectable in serum and urine samples for most groups on at least one day after immunization (day 21, 35 and/or 49). Early immune responses are very important for a fast and robust protection against UPEC infections. Although adaptive immune responses were already quite high for some groups after one vaccination, serum and urine antibody titers induced by vaccination with RNA vaccines or by the protein subunit vaccine can be further increased by a second and third vaccination. The highest titers were detected for groups immunized with nanoparticle-forming antigen designs of RNA constructs, already after one dose, with construct 14 inducing higher titers than construct 13. Dose responses were most pronounced between groups immunized with 1 μg or 4 μg of RNA vaccines.

### 3.2 Analysis of Functional Serum Antibody Responses Against E. Coli FimH Antigen Designs

[0828] The antibody response generated by immunisation with the E. coli FimH constructs as described in Example 3.1 was characterised by the inhibition of bacterial adhesion assay (BAI). The BAI assay was run as described in Example 2.3.

### Results:

[0829] As shown in Table 9, at day 21, BAI titers were observed only for samples 13 and 14, which encode an antigen clustering domain, at 4 μg and 12 μg dosage.

[0830] BAI titers increased at day 35 and 49. Furthermore, a dose response accounting for increasing doses (1, 4 and 12 μg) could be detected. Moreover, constructs 13 and 14, which encode an antigen clustering domain, showed higher BAI titers at all the three dosages in comparison to the single subunit mRNA construct 9. Furthermore, the BAI titers of the FimHdG-AS01 protein vaccine were lower than those of the RNA vaccines. However, while the dose of RNA or proteins administered to rats appear similar in μg quantities no direct comparison between mRNA and protein dosages can be made. This could be due to a range of protein doses that was possibly suboptimal and not reaching maximal responses for responses in Rat Spp. in this study.

TABLE 9
BAI titers of serum antibody responses against E. coli FimH
antigen designs (Example 3.2)

| Construct # | | Immunization | | | |
|---|---|---|---|---|---|
| (RNA ID) | Dose | Group | d21 | d35 | d49 |
| Negative control | 100 μl | A | NR | NR | NR |
| AS01-adjuvanted | 0.7 μg | B | NR | NR | NR |
| FimHdG protein | 2.8 μg | C | NR | NR | 17 |
| subunit vaccine | 8.5 μg | D | NR | NR | 24 |
| 9 (R10396) | 1 μg | E | NR | 21 | 29 |
| | 4 μg | F | 3 | 80 | 142 |
| | 12 μg | G | 3 | 64 | 73 |
| 13 (R10400) | 1 μg | H | 3 | 99 | 377 |
| | 4 μg | I | 12 | 418 | 686 |
| | 12 μg | J | 15 | 207 | 835 |
| 14 (R10401) | 1 μg | K | 3 | 99 | 189 |
| | 4 μg | L | 21 | 440 | 855 |
| | 12 μg | M | 10 | 526 | 586 |

NR indicates sample not responder, “—” indicates that the assay was not analysed to quantify a titer. Due to the low functionality observed after day 21, a titer equal to 3 is assigned to the samples with titer lower than the limit of quantification which did not show a flat inhibition curve, as the one observed for the negative control (NR).

### Example 4: Analysis of E. coli FimH antigen designs with unmodified versus chemically modified mRNA

### 4.1 In Vitro Analysis of Expression and Secretion of E. Coli FimH Antigen Designs Using Western Blot

[0831] To determine the in vitro protein expression of some of the mRNA constructs, HEK 293T cells were transfected with 0.5 μg LNP formulated mRNA encoding different antigen design using 6-well plates. 48 h after transfection, cell lysates and cell culture supernatants were subjected to SOS-PAGE and Western blot analysis using mouse anti-FimHLcys serum (1:1000, as described in Example 2.1) or rabbit anti-alpha-tubulin antibody (1:1000; Cell Signaling) as primary antibodies as well as goat anti-rabbit IgG IRDye® 680RD antibody (1:10000; Li-Cor) or goat anti-mouse IgG IRDye® 8000W antibody (1:10000; Li-Cor) as secondary antibodies. Detection and quantification was performed using a Li-Cor detection system (Odyssey CLx image system) in combination with Image Studio Lite software. Table 10 contains mRNA constructs that were used in the experiment and the result of the experiment is shown in FIG. 5.

TABLE 10
mRNA constructs used for Western blot analysis (Example 4.1)

| | | Pre- | Pre- | |
|---|---|---|---|---|
| | | dicted | dicted | |
| | | size in | size in | |
| Con- | | kDa | kDa | |
| struct | | with | w/o | SEQ ID |
| # (RNA | Antigen design; | signal | signal | NO: |
| ID) | used nucleotides | peptide | peptide | RNA |
| Negative | Medium | — | — | — |
| control | | | | |
| Subunit | Recombinant FimHL protein | 16.9 | | — |
| vaccine | (100 ng loaded on each gel) | (FimHL) | | |
| 9 | MmlgK(1-20)_Ec(J96)- | 33.1 | 30.9 | 679 |
| (R10396) | FimH(22-300)_Linker- | | | |
| | PGDGN_Ec(J96)- | | | |
| | FimG(24-37); | | | |
| | unmodified: uridine (U) | | | |
| 9 | MmlgK(1-20)_Ec(J96)- | 33.1 | 30.9 | 829, |
| (R10949) | FimH(22-300)_Linker- | | | 1274 |
| | PGDGN_Ec(J96)- | | | |
| | FimG(24-37); | | | |
| | modified: pseudouridine (ψ) | | | |
| 9 | MmlgK(1-20)_Ec(J96)- | 33.1 | 30.9 | 829, |
| (R10950) | FimH(22-300)_Linker- | | | 1271 |
| | PGDGN_Ec(J96)- | | | |
| | FimG(24-37); | | | |
| | modified: N1- | | | |
| | methylpseudouridine (m1ψ) | | | |
| 13 | HslgE(1-18)_Ec(J96)- | 49.9 | 47.8 | 683 |
| (R10400) | FimH(22-300)_Linker- | | | |
| | PGDGN_Ec(J96)- | | | |
| | FimG(24-37)_Linker- | | | |
| | SGG_LumSynth(1- | | | |
| | 154_C37A_N102D); | | | |
| | unmodified: uridine (U) | | | |
| 13 | HslgE(1-18)_Ec(J96)- | 49.9 | 47.8 | 833, |
| (R10951) | FimH(22-300)_Linker- | | | 1275 |
| | PGDGN_Ec(J96)- | | | |
| | FimG(24-37)_Linker- | | | |
| | SGG_LumSynth(1- | | | |
| | 154_C37A_N102D); | | | |
| | modified: pseudouridine (ψ) | | | |
| 13 | HslgE(1-18)_Ec(J96)- | 49.9 | 47.8 | 833, |
| (R10952) | FimH(22-300)_Linker- | | | 1272 |
| | PGDGN_Ec(J96)- | | | |
| | FimG(24-37)_Linker- | | | |
| | SGG_LumSynth(1- | | | |
| | 154_C37A_N102D); | | | |
| | modified: N1- | | | |
| | methylpseudouridine (m1ψ) | | | |
| 14 | HslgE(1-18)_Ec(J96)- | 52.1 | 50.0 | 684 |
| (R10401) | FimH(22-300)_Linker- | | | |
| | PGDGN_Ec(J96)- | | | |
| | FimG(24-37)_Linker- | | | |
| | SGG_Ferritin(5-167_N19Q); | | | |
| | unmodified: uridine (U) | | | |
| 14 | HslgE(1-18)_Ec(J96)- | 52.1 | 50.0 | 834, |
| (R10953) | FimH(22-300)_Linker- | | | 1276 |
| | PGDGN_Ec(J96)- | | | |
| | FimG(24-37)_Linker- | | | |
| | SGG_Ferritin(5-167_N19Q); | | | |
| | modified: pseudouridine (ψ) | | | |
| 14 | HslgE(1-18)_Ec(J96)- | 52.1 | 50.0 | 834, |
| (R10954) | FimH(22-300)_Linker- | | | 1273 |
| | PGDGN_Ec(J96)- | | | |
| | FimG(24-37)_Linker- | | | |
| | SGG_Ferritin(5-167_N19Q); | | | |
| | modified: N1- | | | |
| | methylpseudouridine (m1ψ) | | | |

### Results:

[0832] Expression of all nine unmodified and modified RNA constructs was demonstrated in the corresponding cell lysates (see FIG. 51B). Secretion of the tested E. coli FimH antigen designs (unmodified and modified) was detected for construct 9 and 14 by analyzing the supernatant of transfected HEK 293T cells (see FIG. 5A).

### 4.2 Analysis of Immunogenicity of E. Coli FimH Designs in Rats

[0833] mRNA constructs encoding different E. coli FimH antigen designs (see Table 3) were prepared according to Example 1. The mRNA was formulated with Lipid-based carrier (see Example 1.4. Preparation of a LNP formulated mRNA composition). The different mRNA vaccine candidates were applied to female Wistar rats on day 0, 21, and 35 and were administered intramuscularly (i.m.) with 1 μg or 12 μg of unmodified RNA or of pseudouridine (ψ) or N1-methylpseudouridine (mL) modified RNA as shown in Table 11. A negative control group (A) received just buffer (0.9% NaCl) and two groups (B, C) received an AS01-adjuvanted FimHdG protein subunit vaccine. Serum and urine samples were taken at day 1 (18 h), 21, 35, and 49 for determination of humoral immune responses.

[0834] ELISA was performed using recombinant protein FimHL for coating described in Example 2.2. Coated plates were incubated using respective serum or urine dilutions, and binding of specific antibodies to the respective recombinant protein FimHL was detected using goat anti-rat IgG (whole molecule)-Peroxidase antibody (1:5000, Sigma-Aldrich) followed by Amplex® UltraRed reagent (1:200, Invitrogen) as substrate. Endpoint titers of IgG antibody directed against the recombinant protein FimHL were measured by ELISA on day 21, 35, and 49.

TABLE 11
Vaccination regimen (Example 4.2)

| | No. | Construct # | | | | Immu- | | |
|---|---|---|---|---|---|---|---|---|
| | of | (RNA ID); | | | | nisation | | SEQ ID |
| Group | rats | used nucleotides | Dose | | Route | schedule | Samples | NO: RNA |
| A | 8 | Buffer | 100 | μl | i.m. | D 0 | Serum: | — |
| | | (0.9% NaCl) | | | M. | D 21 | D 1 (18 h) | |
| B | 8 | AS01-adjuvanted | 1 | μg | gastrocnemius | D 35 | D 21 | |
| C | 8 | FimHdG protein | 12 | μg | 1 × 100 μl | | D 35 | |
| | | subunit vaccine | | | (protein) | | D 49 | |
| D | 8 | 14 | 1 | μg | 1 × 100 μl | | Urine: | 684 |
| E | 8 | (R10401); | 12 | μg | (mRNA) | | D 21 | |
| | | unmodified: uridine | | | | | D 35 | |
| | | (U) | | | | | D 49 | |
| F | 8 | 14 | 1 | μg | | | Splenocytes: | 834, |
| G | 8 | (R10953); | 12 | μg | | | D 49 | 1276 |
| | | modified: | | | | | | |
| | | pseudouridine (ψ) | | | | | | |
| H | 8 | 14 | 1 | μg | | | | 834, |
| I | 8 | (R10954); | 12 | μg | | | | 1273 |
| | | modified: N1- | | | | | | |
| | | methylpseudouridine | | | | | | |
| | | (m1ψ) | | | | | | |

Detailed antigen design of constructs/RNA IDs or SEQ ID NOs is shown in Table 3 (Example 1).

### Results:

[0835] As shown in FIG. 6, unmodified and pseudouridine (ψ) or N1-methylpseudouridine (m1ψ) modified LNP formulated E. coli FimH RNA vaccines of the tested construct 14 induced substantial humoral immune responses in a dose dependent manner in Wistar rats. FimHL-specific IgG endpoint titers (analyzed via ELISA) were detectable in serum and urine samples for most groups on at least one day after immunization (day 21, 35 and/or 49). Early immune responses are very important for a fast and robust protection against UPEC infections. Although adaptive immune responses were already quite high for some groups after one vaccination, serum and urine antibody titers induced by vaccination with RNA vaccines or by the protein subunit vaccine can be further increased by a second and third vaccination. Groups vaccinated with ψ- and especially m1ψ-containing RNA vaccines tended to have slightly higher urine and serum titers compared with groups vaccinated with the unmodified RNA vaccine.

### 4.3 Analysis of Functional Serum Antibody Responses Against E. Coli FimH Antigen Designs

[0836] The functional antibody response generated by immunisation with the E. coli FimH constructs as described in Example 4.2 was measured by the inhibition of bacterial adhesion assay (BAI). The BAI assay was run as described in Example 2.3.

### Results:

[0837] As shown in Table 12, at day 21, BAI titers were observed for unmodified and pseudouridine (ψ) or N1-methylpseudouridine (m1ψ) modified LNP formulated E. coli FimH RNA vaccines of the tested construct 14 at the higher dose. BAI titers increased at day 35 and 49. Furthermore, the BAI titers of the FimHdG-AS01 protein subunit vaccine were lower than those of the RNA vaccines.

TABLE 12
BAI titers of serum antibody responses against E. coli
FimH antigen designs (Example 4.3)

| | | Immunization | | | |
|---|---|---|---|---|---|
| Construct # (RNA ID) | Dose | Group | d21 | d35 | d49 |
| Buffer | 100 μl | A | NR | NR | NR |
| (0.9% NaCl) | | | | | |
| AS01-adjuvanted FimHdG protein | 1 μg | B | NR | NR | 7 |
| subunit vaccine | 12 μg | C | NR | NR | 27 |
| 14 (R10401); | 1 μg | D | NR | 37 | 74 |
| unmodified: uridine (U) | 12 μg | E | 8 | 83 | 136 |
| 14 (R10953); | 1 μg | F | NR | 71 | 229 |
| modified: pseudouridine (ψ) | 12 μg | G | 19 | 160 | 293 |
| 14 (R10954); | 1 μg | H | NR | 88 | 380 |
| modified: N1-methylpseudouridine | 12 μg | I | 24 | 539 | 405 |
| (m1ψ) | | | | | |

NR (not responder) indicates tested sample lower than the corresponding limit of quantification.

TABLE 13
additional sequences shorter than 10 specifically defined nucleotides or 4
specifically defined amino acids

| SEQ ID | | Sequence | Sequence | |
|---|---|---|---|---|
| NO: | Description | Length | Type | Sequence |
| 121 | mRNA 5′-end | 6 | RNA | GGGAGA |
| 122 | mRNA 5′-end | 6 | RNA | AGGAGA |
| 123 | mRNA 5′-end | 6 | RNA | GGGAAA |
| 124 | mRNA 5′-end | 6 | RNA | AGAAUA |
| 125 | mRNA 5′-end | 6 | RNA | AGAUUA |
| 126 | mRNA 5′-end | 6 | RNA | GAUGGG |
| 127 | mRNA 5′-end | 5 | RNA | GGGCG |
| 130 | Kozak sequence | 9 | DNA | GCCGCCACC |
| 131 | Kozak sequence | 9 | RNA | GCCGCCACC |
| 132 | Kozak sequence | 6 | DNA | GCCACC |
| 133 | Kozak sequence | 6 | RNA | GCCACC |
| 134 | Kozak sequence | 3 | DNA | ACC |
| 135 | Kozak sequence | 3 | RNA | ACC |
| 355 | Artificial_Linker-SGG protein | 3 | protein | SGG |
| 362 | Artificial_Linker-SGG CDS opt1 | 9 | RNA | AGCGGCGGG |
| 369 | Artificial_Linker-SGG CDS opt1 | 9 | RNA | AGCGGCGGG |
| 376 | Artificial_Linker-SGG CDS opt3 | 9 | RNA | AGCGGCGGG |
| 383 | Artificial_Linker-SGG CDS opt4 | 9 | RNA | AGCGGCGGC |
| 390 | Artificial_Linker-SGG CDS opt5 | 9 | RNA | AGCGGCGGG |

1. A coding RNA comprising at least one untranslated region (UTR) and at least one coding sequence encoding an antigenic polypeptide which is selected or derived from Escherichia coli type 1 fimbriae D-mannose specific adhesin (FimH).

2. The coding RNA according to claim 1, wherein the E. coli FimH comprises an amino acid sequence which is identical or at least 70%, 80%, 85%, 86%, 87%, 88%, 89%, 90%, 91%, 92%, 93%, 94%, 95%, 96%, 97%, 98%, or 99% identical to any one of SEQ ID NOs: 177-186, 247-256 or is an immunogenic fragment or immunogenic variant thereof.

3. The coding RNA according to claims 1 or 2, wherein the coding sequence additionally encodes one or more further peptide or protein elements selected from: a donor strand peptide, a signal peptide, an antigen clustering domain, or a transmembrane domain.

4. The coding RNA according to claim 3, wherein the one or more further peptide or protein element(s) is a donor strand peptide, optionally wherein the coding sequence encodes the following elements in N-terminal to C-terminal direction: the antigenic polypeptide which is selected or is derived from E. coli FimH; and the donor strand peptide.

5. The coding RNA according to claim 4, wherein the donor strand peptide comprises or consists of the amino acid sequence of SEQ ID NO: 338 or a variant thereof, optionally wherein the variant of SEQ ID NO: 338 has from 1 to 5, such as 1, 2, 3 or 4 single amino acid mutations compared to SEQ ID NO: 338.

6. The coding RNA according to any one of claims 4 or 5, wherein the coding sequence additionally encodes a peptide linker, optionally wherein the coding sequence encodes the following elements in N-terminal to C-terminal direction: the antigenic polypeptide which is selected or derived from E. coli FimH; the peptide linker element; and the donor strand peptide.

7. The coding RNA according to claim 6, wherein the peptide linker comprises or consists of SEQ ID NO: 352.

8. The coding RNA according to any one of claims 3 to 7, wherein the coding sequence additionally encodes an antigen clustering domain, optionally wherein the antigen clustering domain is selected or derived from ferritin or lumazine synthase.

9. The coding RNA according to claim 8, wherein the amino acid sequence of the antigen clustering domain is identical or at least 70%, 80%, 85%, 86%, 87%, 88%, 89%, 90%, 91%, 92%, 93%, 94%, 95%, 96%, 97%, 98%, or 99% identical to any one of amino acid sequences SEQ ID NOs: 457-459, 443, 444, or fragment or variant thereof.

10. The coding RNA according to any one of claims 3 to 9, wherein the coding sequence additionally encodes a signal peptide, optionally wherein the signal peptide is selected or derived from IgE or IgK, wherein the amino acid sequences of the signal peptides is identical or at least 70%, 80%, 85%, 86%, 87%, 88%, 89%, 90%, 91%, 92%, 93%, 94%, 95%, 96%, 97%, 98%, or 99% identical to any one of amino acid sequences SEQ ID NOs: 394, 395, or fragment or variant thereof.

11. The coding RNA according to any one of claims 3 to 10, wherein the coding sequence encodes the following elements optionally in N-terminal to C-terminal direction:
a) signal peptide, antigenic polypeptide;
b) signal peptide, antigenic polypeptide, peptide linker, donor strand peptide;
c) antigen clustering domain, peptide linker, antigenic polypeptide, peptide linker, donor strand peptide;
d) signal peptide, antigen clustering domain, peptide linker, antigenic polypeptide, peptide linker, donor strand peptide;
e) signal peptide, antigenic polypeptide, peptide linker, donor strand peptide, peptide linker, antigen clustering domain; or
f) signal peptide, antigenic polypeptide, peptide linker, donor strand peptide, peptide linker, transmembrane domain.

12. The coding RNA according to any one of the preceding claims, wherein the coding sequence encodes an amino acid sequence which is identical or at least 70%, 80%, 85%, 86%, 87%, 88%, 89%, 90%, 91%, 92%, 93%, 94%, 95%, 96%, 97%, 98%, or 99% identical to any one of SEQ ID NOs: 177-186, 247-256, 498-520, 1277, or an immunogenic fragment or immunogenic variant thereof.

13. The coding RNA according to any one of the preceding claims, wherein the coding sequence comprises a nucleic acid sequences which is identical or at least 70%, 80%, 85%, 86%, 87%, 88%, 89%, 90%, 91%, 92%, 93%, 94%, 95%, 96%, 97%, 98%, or 99% identical to the sequences according to any one of SEQ ID NOs: 187-246, 257-316, 523-545, 548-570, 573-595, 598-620, 623-645, 648-670, or a fragment or a variant thereof.

14. The coding RNA according to any one of the preceding claims, wherein the coding sequence comprises at least one modified nucleotide selected from pseudouridine (ψ) and N1-methylpseudouridine (m1ψ), optionally wherein essentially all uracil nucleotides are replaced by pseudouridine (ψ) nucleotides and/or N1-methylpseudouridine (m1ψ) nucleotides.

15. The coding RNA according to any one of the preceding claims, wherein the coding sequence is a codon modified coding sequence, wherein the amino acid sequence encoded by the at least one codon modified coding sequence is optionally not being modified compared to the amino acid sequence encoded by the corresponding wild type coding sequence, optionally wherein the at least one codon modified coding sequence is selected from C maximized coding sequence, codon adaptation index (CAI) maximized coding sequence, human codon usage adapted coding sequence, G/C content modified coding sequence, and G/C optimized coding sequence, or any combination thereof.

16. The coding RNA according to any one of the preceding claims, wherein the coding RNA is an mRNA, optionally comprising or consisting of a nucleic acid sequence which is identical or at least 70%, 80%, 85%, 86%, 87%, 88%, 89%, 90%, 91%, 92%, 93%, 94%, 95%, 96%, 97%, 98%, or 99% identical to a nucleic acid sequence according to any one of SEQ ID NOs: 673-695, 698-720, 723-745, 748-770, 773-795, 798-820, 823-845, 848-870, 873-895, 898-920, 923-945, 948-970, 973-995, 998-1020, 1023-1045, 1048-1070, 1073-1095, 1098-1120, 1123-1145, 1148-1170, 1173-1195, 1198-1220, 1223-1245, 1248-1276 or a fragment or variant thereof.

17. A pharmaceutical composition comprising the coding RNA according to any one of claims 1 to 16.

18. The pharmaceutical composition according to claim 17, further comprising lipid-base carriers, wherein the lipid-base carriers are lipid nanoparticles (LNP).

19. A vaccine comprising the coding RNA according to any one of claims 1 to 16, or the pharmaceutical composition according to any one of claims 17 or 18.

20. A Kit or kit of parts, comprising the coding RNA according to any one of claims 1 to 16, the pharmaceutical composition according to any one of claims 17 or 18, and/or the vaccine according to claim 19, optionally comprising a liquid vehicle for solubilising, and, optionally, technical instructions providing information on administration and dosage of the components.

21. The coding RNA according to any one of claims 1 to 16, the pharmaceutical composition according to any one of claims 17 or 18, the vaccine according to claim 19, or the kit or kit of parts according to claim 19, for use as a medicament.

22. The coding RNA according to any one of claims 1 to 17, the pharmaceutical composition according to any one of claims 18 or 19, the vaccine according to claim 20, or the kit or kit of parts according to claim 21, for use in treating or preventing one or more symptoms associated with urinary tract infections (UTI) in a subject in need thereof.

23. The coding RNA according to any one of claims 1 to 16, the pharmaceutical composition according to any one of claims 17 or 18, the vaccine according to claim 19, or the kit or kit of parts according to claim 20, for use in treating or preventing a disease caused by E. coli.

24. A method of treating or preventing a disorder, wherein the method comprises administering to a subject in need thereof an effective amount of the coding RNA according to any one of claims 1 to 16, the pharmaceutical composition according to any one of claims 17 or 18, the vaccine according to claim 21, or the kit or kit of parts according to claim 20.

The application's sequence listing, which the Patent Office published only in electronic form, follows.

SEQUENCE LISTING (1277 sequences)

SEQ ID NO: 1 - DNA, 62 bp, Homo sapiens
  misc_feature 1..62: note = 5'-UTR of human peroxisomal multifunctional enzyme type 2 lacking the 5'-terminal oligopyrimidine tract (HSD17B4)
  source 1..62: mol_type = genomic DNA
gtcccgcagtcggcgtccagcggctctgcttgttcgtgtgtgtgtcgttgcaggccttattc

SEQ ID NO: 2 - RNA, 62 nt, Homo sapiens
  misc_feature 1..62: note = 5'-UTR of human peroxisomal multifunctional enzyme type 2 lacking the 5'-terminal oligopyrimidine tract (HSD17B4) mRNA
  source 1..62: mol_type = mRNA
gtcccgcagtcggcgtccagcggctctgcttgttcgtgtgtgtgtcgttgcaggccttattc

SEQ ID NO: 3 - DNA, 42 bp, Homo sapiens
  misc_feature 1..42: note = 5'-UTR of human ribosomal protein Large 32 lacking the 5'-terminal oligopyrimidine tract (RPL32, 32L4, 32L3)
  source 1..42: mol_type = genomic DNA
ggcgctgcctacggaggtggcagccatctccttctcggcatc

SEQ ID NO: 4 - RNA, 42 nt, Homo sapiens
  misc_feature 1..42: note = 5'-UTR of human ribosomal protein Large 32 lacking the 5'-terminal oligopyrimidine tract (RPL32, 32L4, 32L3) mRNA
  source 1..42: mol_type = mRNA
ggcgctgcctacggaggtggcagccatctccttctcggcatc

SEQ ID NO: 5 - DNA, 31 bp, Homo sapiens
  misc_feature 1..31: note = 5'-UTR of human androgen-induced gene 1 protein lacking the 5'-terminal oligopyrimidine tract (AIG1)
  source 1..31: mol_type = genomic DNA
gccgcccagccggtccaggcctctggcgaac

SEQ ID NO: 6 - RNA, 31 nt, Homo sapiens
  misc_feature 1..31: note = 5'-UTR of human androgen-induced gene 1 protein lacking the 5'-terminal oligopyrimidine tract (AIG1) mRNA
  source 1..31: mol_type = mRNA
gccgcccagccggtccaggcctctggcgaac

SEQ ID NO: 7 - DNA, 42 bp, Homo sapiens
  misc_feature 1..42: note = 5'-UTR of human acid ceramidase lacking the 5'-terminal oligopyrimidine tract (ASAH1)
  source 1..42: mol_type = genomic DNA
gcctctgctggagtccggggagtggcgttggctgctagagcg

SEQ ID NO: 8 - RNA, 42 nt, Homo sapiens
  misc_feature 1..42: note = 5'-UTR of human acid ceramidase lacking the 5'-terminal oligopyrimidine tract (ASAH1) mRNA
  source 1..42: mol_type = mRNA
gcctctgctggagtccggggagtggcgttggctgctagagcg

SEQ ID NO: 9 - DNA, 75 bp, Homo sapiens
  misc_feature 1..75: note = 5'-UTR of human mitochondrial ATP synthase subunit alpha lacking the 5'-terminal oligopyrimidine tract (ATP5A1)
  source 1..75: mol_type = genomic DNA
gcggctcggccattttgtcccagtcagtccggaggctgcggctgcagaagtaccgcctgcggagtaactgcaaag

SEQ ID NO: 10 - RNA, 75 nt, Homo sapiens
  misc_feature 1..75: note = 5'-UTR of human mitochondrial ATP synthase subunit alpha lacking the 5'-terminal oligopyrimidine tract (ATP5A1) mRNA
  source 1..75: mol_type = mRNA
gcggctcggccattttgtcccagtcagtccggaggctgcggctgcagaagtaccgcctgcggagtaactgcaaag

SEQ ID NO: 11 - DNA, 56 bp, Homo sapiens
  misc_feature 1..56: note = 5'-UTR of human cytochrome c oxidase subunit 6C lacking the 5'-terminal oligopyrimidine tract (COX6C)
  source 1..56: mol_type = genomic DNA
agtcaggaaggacgttggtgttgaggttagcatacgtatcaaggacagtaactacc

SEQ ID NO: 12 - RNA, 56 nt, Homo sapiens
  misc_feature 1..56: note = 5'-UTR of human cytochrome c oxidase subunit 6C lacking the 5'-terminal oligopyrimidine tract (COX6C) mRNA
  source 1..56: mol_type = mRNA
agtcaggaaggacgttggtgttgaggttagcatacgtatcaaggacagtaactacc

SEQ ID NO: 13 - DNA, 232 bp, Mus musculus
  misc_feature 1..232: note = 5'-UTR of mouse dihydropyrimidinase-like 2 (Dpysl2)
  source 1..232: mol_type = genomic DNA
ctctctccctctttcttttttccgccctagctggatctgtgttggaggagaggaaaagagacagaggattgcatctgttttgaaatctcctaatagcaagaccagttaagggattgtacctttttcctacaaatataaatatatatatattttaaaccaagtctttttttttccggctatctttgctttaaagctgtcctcttgagattacttcctcccgccccccggagag

SEQ ID NO: 14 - RNA, 232 nt, Mus musculus
  misc_feature 1..232: note = 5'-UTR of mouse dihydropyrimidinase-like 2 (Dpysl2) mRNA
  source 1..232: mol_type = mRNA
ctctctccctctttcttttttccgccctagctggatctgtgttggaggagaggaaaagagacagaggattgcatctgttttgaaatctcctaatagcaagaccagttaagggattgtacctttttcctacaaatataaatatatatatattttaaaccaagtctttttttttccggctatctttgctttaaagctgtcctcttgagattacttcctcccgccccccggagag

SEQ ID NO: 15 - DNA, 22 bp, Homo sapiens
  misc_feature 1..22: note = 5'-UTR of human ATP binding cassette subfamily B member 7 lacking the 5'-terminal oligopyrimidine tract (MDR, ABCB7)
  source 1..22: mol_type = genomic DNA
ggttcctctttcctcgctcaag

SEQ ID NO: 16 - RNA, 22 nt, Homo sapiens
  misc_feature 1..22: note = 5'-UTR of human ATP binding cassette subfamily B member 7 lacking the 5'-terminal oligopyrimidine tract (MDR, ABCB7) mRNA
  source 1..22: mol_type = mRNA
ggttcctctttcctcgctcaag

SEQ ID NO: 17 - DNA, 54 bp, Mus musculus
  misc_feature 1..54: note = 5'-UTR of mouse RIKEN cDNA 2010107E04 gene (Mp68, 2010107E04Rik)
  source 1..54: mol_type = genomic DNA
ctttcccattctgtagcagaatttggtgttgcctgtggtcttggtcccgcggag

SEQ ID NO: 18 - RNA, 54 nt, Mus musculus
  misc_feature 1..54: note = 5'-UTR of mouse RIKEN cDNA 2010107E04 gene (Mp68, 2010107E04Rik) mRNA
  source 1..54: mol_type = mRNA
ctttcccattctgtagcagaatttggtgttgcctgtggtcttggtcccgcggag

SEQ ID NO: 19 - DNA, 81 bp, Mus musculus
  misc_feature 1..81: note = 5'-UTR of mouse NADH dehydrogenase (ubiquinone) 1 alpha subcomplex, 4 (Ndufa4)
  source 1..81: mol_type = genomic DNA
gtccgctcagccaggttgcagaagcggcttagcgtgtgtcctaatcttctctctgcgtgtaggtaggcctgtgccgcaaac

SEQ ID NO: 20 - RNA, 81 nt, Mus musculus
  misc_feature 1..81: note = 5'-UTR of mouse NADH dehydrogenase (ubiquinone) 1 alpha subcomplex, 4 (Ndufa4) mRNA
  source 1..81: mol_type = mRNA
gtccgctcagccaggttgcagaagcggcttagcgtgtgtcctaatcttctctctgcgtgtaggtaggcctgtgccgcaaac

SEQ ID NO: 21 - DNA, 108 bp, Mus musculus
  misc_feature 1..108: note = 5'-UTR of mouse nitric oxide synthase interacting protein (Nosip)
  source 1..108: mol_type = genomic DNA
ctcctgtcgggcggaagtaggaggagtagagtttaaaaacagtactctttttccggttcgggacgtagttgaagcaacgacaagccggataaccgctcttgagacagg

SEQ ID NO: 22 - RNA, 108 nt, Mus musculus
  misc_feature 1..108: note = 5'-UTR of mouse nitric oxide synthase interacting protein (Nosip) mRNA
  source 1..108: mol_type = mRNA
ctcctgtcgggcggaagtaggaggagtagagtttaaaaacagtactctttttccggttcgggacgtagttgaagcaacgacaagccggataaccgctcttgagacagg

SEQ ID NO: 23 - DNA, 84 bp, Mus musculus
  misc_feature 1..84: note = 5'-UTR of mouse ribosomal protein L31 (Rpl31)
  source 1..84: mol_type = genomic DNA
cccgtgacccggaagttgtacggctacgcgactttccctcccacaaaccctcgcgcccttcctttcctacttgggcccggcaga

SEQ ID NO: 24 - RNA, 84 nt, Mus musculus
  misc_feature 1..84: note = 5'-UTR of mouse ribosomal protein L31 (Rpl31) mRNA
  source 1..84: mol_type = mRNA
cccgtgacccggaagttgtacggctacgcgactttccctcccacaaaccctcgcgcccttcctttcctacttgggcccggcaga

SEQ ID NO: 25 - DNA, 56 bp, Homo sapiens
  misc_feature 1..56: note = 5'-UTR of human 60S ribosomal protein L35a lacking the 5'-terminal oligopyrimidine tract (RPL35A)
  source 1..56: mol_type = genomic DNA
accgccatcttggctcctgtggaggcctgctgggaacgggacttctaaaaggaact

SEQ ID NO: 26 - RNA, 56 nt, Homo sapiens
  misc_feature 1..56: note = 5'-UTR of human 60S ribosomal protein L35a lacking the 5'-terminal oligopyrimidine tract (RPL35A) mRNA
  source 1..56: mol_type = mRNA
accgccatcttggctcctgtggaggcctgctgggaacgggacttctaaaaggaact

SEQ ID NO: 27 - DNA, 159 bp, Mus musculus
  misc_feature 1..159: note = 5'-UTR of mouse solute carrier family 7 (cationic amino acid transporter, y+ system), member 3 (Slc7a3)
  source 1..159: mol_type = genomic DNA
gggcgcttggcttgcaaggaccctgagctgcggcattgaagcacacccaacccaactcgactgaagtcagcctcactgaaccggatctgagaatcttctctctctgggcttgccagggctctccgaacctagctagcatcctcttcaattccaactaga

SEQ ID NO: 28 - RNA, 159 nt, Mus musculus
  misc_feature 1..159: note = 5'-UTR of mouse solute carrier family 7 (cationic amino acid transporter, y+ system), member 3 (Slc7a3) mRNA
  source 1..159: mol_type = mRNA
gggcgcttggcttgcaaggaccctgagctgcggcattgaagcacacccaacccaactcgactgaagtcagcctcactgaaccggatctgagaatcttctctctctgggcttgccagggctctccgaacctagctagcatcctcttcaattccaactaga

SEQ ID NO: 29 - DNA, 102 bp, Homo sapiens
  misc_feature 1..102: note = 5'-UTR of human tubulin beta 4B class Ivb (TUBB4B)
  source 1..102: mol_type = genomic DNA
atataagcgttggcggagcgtcggttgtagcactctgcgcgcccgctcttctgctgctgtttgtctacttcctcctgcttccccgccgccgccgccgccatc

SEQ ID NO: 30 - RNA, 102 nt, Homo sapiens
  misc_feature 1..102: note = 5'-UTR of human tubulin beta 4B class Ivb (TUBB4B) mRNA
  source 1..102: mol_type = mRNA
atataagcgttggcggagcgtcggttgtagcactctgcgcgcccgctcttctgctgctgtttgtctacttcctcctgcttccccgccgccgccgccgccatc

SEQ ID NO: 31 - DNA, 222 bp, Mus musculus
  misc_feature 1..222: note = 5'-UTR of mouse ubiquilin 2 (Ubqln2)
  source 1..222: mol_type = genomic DNA
cggagacggcctgcaggacctgctctctcagccctcagccgaggcctacgccgagccgagtgcgcagccgacgaccgggaggagccgcagccttcaactctgaggtactgtgatccgcgctgcccgccgggccgccccagtccgctgctgcggcacctccttccctcgcgccctcttcgctcgccagcgccttccctgtgagcctgcgtcaccgcggccgcc

SEQ ID NO: 32 - RNA, 222 nt, Mus musculus
  misc_feature 1..222: note = 5'-UTR of mouse ubiquilin 2 (Ubqln2) mRNA
  source 1..222: mol_type = mRNA
cggagacggcctgcaggacctgctctctcagccctcagccgaggcctacgccgagccgagtgcgcagccgacgaccgggaggagccgcagccttcaactctgaggtactgtgatccgcgctgcccgccgggccgccccagtccgctgctgcggcacctccttccctcgcgccctcttcgctcgccagcgccttccctgtgagcctgcgtcaccgcggccgcc

SEQ ID NO: 33 - DNA, 57 bp, synthetic construct
  misc_feature 1..57: note = synthetic-v1 5'-UTR
  source 1..57: mol_type = other DNA
gggaaataagagagaaaagaagagtaagaagaaatataagaccccggcgccgccacc

SEQ ID NO: 34 - RNA, 57 nt, synthetic construct
  misc_feature 1..57: note = synthetic-v1 5'-UTR mRNA
  source 1..57: mol_type = other RNA
gggaaataagagagaaaagaagagtaagaagaaatataagaccccggcgccgccacc

SEQ ID NO: 35 - DNA, 57 bp, synthetic construct
  misc_feature 1..57: note = synthetic-v2 5'-UTR
  source 1..57: mol_type = other DNA
aggagataagagagaaaagaagagtaagaagaaatataagaccccggcgccgccacc

SEQ ID NO: 36 - RNA, 57 nt, synthetic construct
  misc_feature 1..57: note = synthetic-v2 5'-UTR mRNA
  source 1..57: mol_type = other RNA
aggagataagagagaaaagaagagtaagaagaaatataagaccccggcgccgccacc

SEQ ID NO: 37 - DNA, 47 bp, synthetic construct
  misc_feature 1..47: note = synthetic-v3 5'-UTR
  source 1..47: mol_type = other DNA
gggaaataagagagaaaagaagagtaagaagaaatataagagccacc

SEQ ID NO: 38 - RNA, 47 nt, synthetic construct
  misc_feature 1..47: note = synthetic-v3 5'-UTR mRNA
  source 1..47: mol_type = other RNA
gggaaataagagagaaaagaagagtaagaagaaatataagagccacc

SEQ ID NO: 39 - DNA, 47 bp, synthetic construct
  misc_feature 1..47: note = synthetic-v4 5'-UTR
  source 1..47: mol_type = other DNA
aggagataagagagaaaagaagagtaagaagaaatataagagccacc

SEQ ID NO: 40 - RNA, 47 nt, synthetic construct
  misc_feature 1..47: note = synthetic-v4 5'-UTR mRNA
  source 1..47: mol_type = other RNA
aggagataagagagaaaagaagagtaagaagaaatataagagccacc

SEQ ID NO: 41 - DNA, 54 bp, synthetic construct
  misc_feature 1..54: note = synthetic-v5 5'-UTR
  source 1..54: mol_type = other DNA
gggaaataagagagaaaagaagagtaagaagaaatataagaccccggcgccacc

SEQ ID NO: 42 - RNA, 54 nt, synthetic construct
  misc_feature 1..54: note = synthetic-v5 5'-UTR mRNA
  source 1..54: mol_type = other RNA
gggaaataagagagaaaagaagagtaagaagaaatataagaccccggcgccacc

SEQ ID NO: 43 - DNA, 54 bp, synthetic construct
  misc_feature 1..54: note = synthetic-v6 5'-UTR
  source 1..54: mol_type = other DNA
aggagataagagagaaaagaagagtaagaagaaatataagaccccggcgccacc

SEQ ID NO: 44 - RNA, 54 nt, synthetic construct
  misc_feature 1..54: note = synthetic-v6 5'-UTR mRNA
  source 1..54: mol_type = other RNA
aggagataagagagaaaagaagagtaagaagaaatataagaccccggcgccacc

SEQ ID NO: 45 - DNA, 67 bp, synthetic construct
  misc_feature 1..67: note = synthetic-v7 5'-UTR
  source 1..67: mol_type = other DNA
gggaaataagagagaaaagaagagtaagaagaaatataagagcgccccgcggcgccccgcggccacc

SEQ ID NO: 46 - RNA, 67 nt, synthetic construct
  misc_feature 1..67: note = synthetic-v7 5'-UTR mRNA
  source 1..67: mol_type = other RNA
gggaaataagagagaaaagaagagtaagaagaaatataagagcgccccgcggcgccccgcggccacc

SEQ ID NO: 47 - DNA, 67 bp, synthetic construct
  misc_feature 1..67: note = synthetic-v8 5'-UTR
  source 1..67: mol_type = other DNA
aggagataagagagaaaagaagagtaagaagaaatataagagcgccccgcggcgccccgcggccacc

SEQ ID NO: 48 - RNA, 67 nt, synthetic construct
  misc_feature 1..67: note = synthetic-v8 5'-UTR mRNA
  source 1..67: mol_type = other RNA
aggagataagagagaaaagaagagtaagaagaaatataagagcgccccgcggcgccccgcggccacc

SEQ ID NO: 49 - DNA, 53 bp, synthetic construct
  misc_feature 1..53: note = HBA1-v1 5'-UTR
  source 1..53: mol_type = other DNA
agaataaactagtattcttctggtccccacagactcagagagaacccgccacc

SEQ ID NO: 50 - RNA, 53 nt, synthetic construct
  misc_feature 1..53: note = HBA1-v1 5'-UTR mRNA
  source 1..53: mol_type = other RNA
agaataaactagtattcttctggtccccacagactcagagagaacccgccacc

SEQ ID NO: 51 - DNA, 56 bp, synthetic construct
  misc_feature 1..56: note = HBA1-v2 5'-UTR
  source 1..56: mol_type = other DNA
aggagaataaactagtattcttctggtccccacagactcagagagaacccgccacc

SEQ ID NO: 52 - RNA, 56 nt, synthetic construct
  misc_feature 1..56: note = HBA1-v2 5'-UTR mRNA
  source 1..56: mol_type = other RNA
aggagaataaactagtattcttctggtccccacagactcagagagaacccgccacc

SEQ ID NO: 53 - DNA, 53 bp, synthetic construct
  misc_feature 1..53: note = HBA1-v3 5'-UTR
  source 1..53: mol_type = other DNA
aggagaaactagtattcttctggtccccacagactcagagagaacccgccacc

SEQ ID NO: 54 - RNA, 53 nt, synthetic construct
  misc_feature 1..53: note = HBA1-v3 5'-UTR mRNA
  source 1..53: mol_type = other RNA
aggagaaactagtattcttctggtccccacagactcagagagaacccgccacc

SEQ ID NO: 55 - DNA, 53 bp, synthetic construct
  misc_feature 1..53: note = HBA1-v4 5'-UTR
  source 1..53: mol_type = other DNA
agattaaactagtattcttctggtccccacagactcagagagaacccgccacc

SEQ ID NO: 56 - RNA, 53 nt, synthetic construct
  misc_feature 1..53: note = HBA1-v4 5'-UTR mRNA
  source 1..53: mol_type = other RNA
agattaaactagtattcttctggtccccacagactcagagagaacccgccacc

SEQ ID NO: 57 - DNA, 52 bp, synthetic construct
  misc_feature 1..52: note = HBA1-v5 5'-UTR
  source 1..52: mol_type = other DNA
agacgaactagtattcttctggtccccacagactcagagagaacccgccacc

SEQ ID NO: 58 - RNA, 52 nt, synthetic construct
  misc_feature 1..52: note = HBA1-v5 5'-UTR mRNA
  source 1..52: mol_type = other RNA
agacgaactagtattcttctggtccccacagactcagagagaacccgccacc

SEQ ID NO: 59 - DNA, 52 bp, synthetic construct
  misc_feature 1..52: note = HBA1-v6 5'-UTR
  source 1..52: mol_type = other DNA
gggcgaactagtattcttctggtccccacagactcagagagaacccgccacc

SEQ ID NO: 60 - RNA, 52 nt, synthetic construct
  misc_feature 1..52: note = HBA1-v6 5'-UTR mRNA
  source 1..52: mol_type = other RNA
gggcgaactagtattcttctggtccccacagactcagagagaacccgccacc

SEQ ID NO: 61 - DNA, 140 bp, synthetic construct
  misc_feature 1..140: note = HHV5-v1 5'-UTR
  source 1..140: mol_type = other DNA
ggacagatcgcctggagacgccatccacgctgttttgacctccatagaagacaccgggaccgatccagcctccgcggccgggaacggtgcattggaacgcggattccccgtgccaagagtgactcaccgtccttgacacg

SEQ ID NO: 62 - RNA, 140 nt, synthetic construct
  misc_feature 1..140: note = HHV5-v1 5'-UTR mRNA
  source 1..140: mol_type = other RNA
ggacagatcgcctggagacgccatccacgctgttttgacctccatagaagacaccgggaccgatccagcctccgcggccgggaacggtgcattggaacgcggattccccgtgccaagagtgactcaccgtccttgacacg

SEQ ID NO: 63 - DNA, 143 bp, synthetic construct
  misc_feature 1..143: note = HHV5-v1 5'-UTR
  source 1..143: mol_type = other DNA
aggagacagatcgcctggagacgccatccacgctgttttgacctccatagaagacaccgggaccgatccagcctccgcggccgggaacggtgcattggaacgcggattccccgtgccaagagtgactcaccgtccttgacacg

SEQ ID NO: 64 - RNA, 143 nt, synthetic construct
  misc_feature 1..143: note = HHV5-v1 5'-UTR mRNA
  source 1..143: mol_type = other RNA
aggagacagatcgcctggagacgccatccacgctgttttgacctccatagaagacaccgggaccgatccagcctccgcggccgggaacggtgcattggaacgcggattccccgtgccaagagtgactcaccgtccttgacacg

SEQ ID NO: 65 - DNA, 77 bp, synthetic construct
  misc_feature 1..77: note = HSD17B4-v2 5'-UTR
  source 1..77: mol_type = other DNA
aggagagtcccgcagtcggcgtccagcggctctgcttgttcgtgtgtgtgtcgttgcaggccttattcaagcttacc

SEQ ID NO: 66 - RNA, 77 nt, synthetic construct
  misc_feature 1..77: note = HSD17B4-v2 5'-UTR mRNA
  source 1..77: mol_type = other RNA
aggagagtcccgcagtcggcgtccagcggctctgcttgttcgtgtgtgtgtcgttgcaggccttattcaagcttacc

SEQ ID NO: 67 - DNA, 57 bp, Homo sapiens
  misc_feature 1..57: note = 3'-UTR of human proteasome subunit beta 3 (PSMB3)
  source 1..57: mol_type = genomic DNA
ccctgttcccagagcccacttttttttctttttttgaaataaaatagcctgtctttc

SEQ ID NO: 68 - RNA, 57 nt, Homo sapiens
  misc_feature 1..57: note = 3'-UTR of human proteasome subunit beta 3 (PSMB3) mRNA
  source 1..57: mol_type = mRNA
ccctgttcccagagcccacttttttttctttttttgaaataaaatagcctgtctttc

SEQ ID NO: 69 - DNA, 44 bp, Homo sapiens
  misc_feature 1..44: note = Center, alpha-complex-binding portion of the 3'-UTR of an alpha-globin gene (muag)
  source 1..44: mol_type = genomic DNA
gcccgatgggcctcccaacgggccctcctcccctccttgcaccg

SEQ ID NO: 70 - RNA, 44 nt, Homo sapiens
  misc_feature 1..44: note = Center, alpha-complex-binding portion of the 3'-UTR of an alpha-globin gene (muag) mRNA
  source 1..44: mol_type = mRNA
gcccgatgggcctcccaacgggccctcctcccctccttgcaccg

SEQ ID NO: 71 - DNA, 187 bp, Homo sapiens
  misc_feature 1..187: note = 3'-UTR ALB7
  source 1..187: mol_type = genomic DNA
gcatcacatttaaaagcatctcagcctaccatgagaataagagaaagaaaatgaagatcaatagcttattcatctctttttctttttcgttggtgtaaagccaacaccctgtctaaaaaacataaatttctttaatcattttgcctcttttctctgtgcttcaattaataaaaaatggaaagaacct

SEQ ID NO: 72 - RNA, 187 nt, Homo sapiens
  misc_feature 1..187: note = 3'-UTR ALB7 mRNA
  source 1..187: mol_type = mRNA
gcatcacatttaaaagcatctcagcctaccatgagaataagagaaagaaaatgaagatcaatagcttattcatctctttttctttttcgttggtgtaaagccaacaccctgtctaaaaaacataaatttctttaatcattttgcctcttttctctgtgcttcaattaataaaaaatggaaagaacct

SEQ ID NO: 73 - DNA, 266 bp, Homo sapiens
  misc_feature 1..266: note = 3'-UTR of human annexin A4 (ANXA4)
  source 1..266: mol_type = genomic DNA
aataaaaatcccagaaggacaggaggattctcaacactttgaatttttttaacttcatttttctacactgctattatcattatctcagaatgcttatttccaattaaaacgcctacagctgcctcctagaatatagactgtctgtattattattcacctataattagtcattatgatgctttaaagctgtacttgcatttcaaagcttataagatataaatggagattttaaagtagaaataaatatgtattccatgtttttaaaa

SEQ ID NO: 74 - RNA, 266 nt, Homo sapiens
  misc_feature 1..266: note = 3'-UTR of human annexin A4 (ANXA4) mRNA
  source 1..266: mol_type = mRNA
aataaaaatcccagaaggacaggaggattctcaacactttgaatttttttaacttcatttttctacactgctattatcattatctcagaatgcttatttccaattaaaacgcctacagctgcctcctagaatatagactgtctgtattattattcacctataattagtcattatgatgctttaaagctgtacttgcatttcaaagcttataagatataaatggagattttaaagtagaaataaatatgtattccatgtttttaaaa

SEQ ID NO: 75 - DNA, 121 bp, Homo sapiens
  misc_feature 1..121: note = 3'-UTR of human caspase 1 (CASP1)
  source 1..121: mol_type = genomic DNA
aataaggaaactgtatgaatgtctgtgggcaggaagtgaagagatccttctgtaaaggtttttggaattatgtctgctgaataataaacttttttgaaataataaatctggtagaaaaatg

SEQ ID NO: 76 - RNA, 121 nt, Homo sapiens
  misc_feature 1..121: note = 3'-UTR of human caspase 1 (CASP1) mRNA
  source 1..121: mol_type = mRNA
aataaggaaactgtatgaatgtctgtgggcaggaagtgaagagatccttctgtaaaggtttttggaattatgtctgctgaataataaacttttttgaaataataaatctggtagaaaaatg

SEQ ID NO: 77 - DNA, 137 bp, Homo sapiens
  misc_feature 1..137: note = 3'-UTR of human cytochrome c oxidase subunit 6B1 (COX6B1)
  source 1..137: mol_type = genomic DNA
actggctgcatctccctttcctctgtcctccatccttctcccaggatggtgaagggggacctggtacccagtgatccccaccccaggatcctaaatcatgacttacctgctaataaaaactcattggaaaagtgaga

SEQ ID NO: 78 - RNA, 137 nt, Homo sapiens
  misc_feature 1..137: note = 3'-UTR of human cytochrome c oxidase subunit 6B1 (COX6B1) mRNA
  source 1..137: mol_type = mRNA
actggctgcatctccctttcctctgtcctccatccttctcccaggatggtgaagggggacctggtacccagtgatccccaccccaggatcctaaatcatgacttacctgctaataaaaactcattggaaaagtgaga

SEQ ID NO: 79 - DNA, 166 bp, Homo sapiens
  misc_feature 1..166: note = 3'-UTR of human FIG4 phosphoinositide 5-phosphatase (FIG4)
  source 1..166: mol_type = genomic DNA
aaagagcgcaggtccacctggtggacacgtctgattagcttagaacctgtcttgtctcatcttcaaaaggtaacttattaaaagtcctttgcgtctgaagcctttctccttttctgtcacttgcaaattccaaattatagctaataaagatgactagataatttgc

SEQ ID NO: 80 - RNA, 166 nt, Homo sapiens
  misc_feature 1..166: note = 3'-UTR of human FIG4 phosphoinositide 5-phosphatase (FIG4) mRNA
  source 1..166: mol_type = mRNA
aaagagcgcaggtccacctggtggacacgtctgattagcttagaacctgtcttgtctcatcttcaaaaggtaacttattaaaagtcctttgcgtctgaagcctttctccttttctgtcacttgcaaattccaaattatagctaataaagatgactagataatttgc

SEQ ID NO: 81 - DNA, 353 bp, Mus musculus
  misc_feature 1..353: note = 3'-UTR of mouse GNAS (guanine nucleotide binding protein, alpha stimulating) complex locus (Gnas)
  source 1..353: mol_type = genomic DNA
gaagggaacacccaaatttaattcagccttaagcacaattaattaagagtgaaacgtaattgtacaagcagttggtcacccaccatagggcatgatcaacaccgcaacctttcctttttcccccagtgattctgaaaaacccctcttcccttcagcttgcttagatgttccaaatttagtaagcttaaggcggcctacagaagaaaaagaaaaaaaaggccacaaaagttccctctcactttcagtaaataaaataaaagcagcaacagaaataaagaaataaatgaaattcaaaatgaaataaatattgtgttgtgcagcattaaaaaatcaataaaaattaaaaatgagca

SEQ ID NO: 82 - RNA, 353 nt, Mus musculus
  misc_feature 1..353: note = 3'-UTR of mouse GNAS (guanine nucleotide binding protein, alpha stimulating) complex locus (Gnas) mRNA
  source 1..353: mol_type = mRNA
gaagggaacacccaaatttaattcagccttaagcacaattaattaagagtgaaacgtaattgtacaagcagttggtcacccaccatagggcatgatcaacaccgcaacctttcctttttcccccagtgattctgaaaaacccctcttcccttcagcttgcttagatgttccaaatttagtaagcttaaggcggcctacagaagaaaaagaaaaaaaaggccacaaaagttccctctcactttcagtaaataaaataaaagcagcaacagaaataaagaaataaatgaaattcaaaatgaaataaatattgtgttgtgcagcattaaaaaatcaataaaaattaaaaatgagca

SEQ ID NO: 83 - DNA, 133 bp, Mus musculus
  misc_feature 1..133: note = 3'-UTR of mouse NADH dehydrogenase (ubiquinone) 1 alpha subcomplex, 1 (Ndufa1)
  source 1..133: mol_type = genomic DNA
ggaagcattttcctggctgattaaaagaaattactcagctatggtcatctgttcctgttagaaggctatgcagcatattatatactatgcgcatgttatgaaatgcataataaaaaattttaaaaaatctaaa

SEQ ID NO: 84 - RNA, 133 nt, Mus musculus
  misc_feature 1..133: note = 3'-UTR of mouse NADH dehydrogenase (ubiquinone) 1 alpha subcomplex, 1 (Ndufa1) mRNA
  source 1..133: mol_type = mRNA
ggaagcattttcctggctgattaaaagaaattactcagctatggtcatctgttcctgttagaaggctatgcagcatattatatactatgcgcatgttatgaaatgcataataaaaaattttaaaaaatctaaa

SEQ ID NO: 85 - DNA, 70 bp, Homo sapiens
  misc_feature 1..70: note = 3'-UTR of human ribosomal protein S9 (RPS9)
  source 1..70: mol_type = genomic DNA
gtccacctgtccctcctgggctgctggattgtctcgttttcctgccaaataaacaggatcagcgctttac

SEQ ID NO: 86 - RNA, 70 nt, Homo sapiens
  misc_feature 1..70: note = 3'-UTR of human ribosomal protein S9 (RPS9) mRNA
  source 1..70: mol_type = mRNA
gtccacctgtccctcctgggctgctggattgtctcgttttcctgccaaataaacaggatcagcgctttac

SEQ ID NO: 87 - DNA, 240 bp, Mus musculus
  misc_feature 1..240: note = 3'-UTR of mouse solute carrier family 7 (cationic amino acid transporter, y+ system), member 3 (Slc7a3)
  source 1..240: mol_type = genomic DNA
cctaaccatacctaattgttgtcttgttctcctatacaataatggagagtactcttgaccccacgaagagctgggcctctcatgtggtgttagtgacggatatgaaataatgctctgtatttcttgtgaaatgatggctatgtctttgctgtttctcatttgtttttaacttgtatactttgaaatagtctctgtagttgtttcctggctttgaaaaaaatgttattaaaggaaaattgt

SEQ ID NO: 88 - RNA, 240 nt, Mus musculus
  misc_feature 1..240: note = 3'-UTR of mouse solute carrier family 7 (cationic amino acid transporter, y+ system), member 3 (Slc7a3) mRNA
  source 1..240: mol_type = mRNA
cctaaccatacctaattgttgtcttgttctcctatacaataatggagagtactcttgaccccacgaagagctgggcctctcatgtggtgttagtgacggatatgaaataatgctctgtatttcttgtgaaatgatggctatgtctttgctgtttctcatttgtttttaacttgtatactttgaaatagtctctgtagttgtttcctggctttgaaaaaaatgttattaaaggaaaattgt

SEQ ID NO: 89 - DNA, 151 bp, Homo sapiens
  misc_feature 1..151: note = 3'-UTR of human tubulin beta 4B class Ivb (TUBB4B)
  source 1..151: mol_type = genomic DNA
agccttcagtcactggggaaagcagggaagcagtgtgaactctttattcactcccagcctgtcctgtggcctgtcccactgtgtgcacttgctgttttccctgtccacatccatgctgtacagacaccaccattaaagcattttcatagtg

SEQ ID NO: 90 - RNA, 151 nt, Homo sapiens
  misc_feature 1..151: note = 3'-UTR of human tubulin beta 4B class Ivb (TUBB4B) mRNA
  source 1..151: mol_type = mRNA
agccttcagtcactggggaaagcagggaagcagtgtgaactctttattcactcccagcctgtcctgtggcctgtcccactgtgtgcacttgctgttttccctgtccacatccatgctgtacagacaccaccattaaagcattttcatagtg

SEQ ID NO: 91 - DNA, 119 bp, synthetic construct
  misc_feature 1..119: note = HBA1-v1 3'-UTR
  source 1..119: mol_type = other DNA
tgataataggctggagcctcggtggcctagcttcttgccccttgggcctccccccagcccctcctccccttcctgcacccgtacccccgtggtctttgaataaagtctgagtgggcggc

SEQ ID NO: 92 - RNA, 119 nt, synthetic construct
  misc_feature 1..119: note = HBA1-v1 3'-UTR mRNA
  source 1..119: mol_type = other RNA
tgataataggctggagcctcggtggcctagcttcttgccccttgggcctccccccagcccctcctccccttcctgcacccgtacccccgtggtctttgaataaagtctgagtgggcggc

SEQ ID NO: 93 - DNA, 119 bp, synthetic construct
  misc_feature 1..119: note = HBA1-v2 3'-UTR
  source 1..119: mol_type = other DNA
tgataataggctggagcctcggtggccatgcttcttgccccttgggcctccccccagcccctcctccccttcctgcacccgtacccccgtggtctttgaataaagtctgagtgggcggc

SEQ ID NO: 94 - RNA, 119 nt, synthetic construct
  misc_feature 1..119: note = HBA1-v2 3'-UTR mRNA
  source 1..119: mol_type = other RNA
tgataataggctggagcctcggtggccatgcttcttgccccttgggcctccccccagcccctcctccccttcctgcacccgtacccccgtggtctttgaataaagtctgagtgggcggc

SEQ ID NO: 95 - DNA, 110 bp, Homo sapiens
  misc_feature 1..110: note = HBA1-v3 3'-UTR
  source 1..110: mol_type = genomic DNA
gctggagcctcggtggccatgcttcttgccccttgggcctccccccagcccctcctccccttcctgcacccgtacccccgtggtctttgaataaagtctgagtgggcggc

SEQ ID NO: 96 - RNA, 110 nt, Homo sapiens
  misc_feature 1..110: note = HBA1-v3 3'-UTR mRNA
  source 1..110: mol_type = mRNA
gctggagcctcggtggccatgcttcttgccccttgggcctccccccagcccctcctccccttcctgcacccgtacccccgtggtctttgaataaagtctgagtgggcggc

SEQ ID NO: 97 - DNA, 108 bp, Homo sapiens
  misc_feature 1..108: note = HBA2 3'-UTR
  source 1..108: mol_type = genomic DNA
gctggagcctcggtagccgttcctcctgcccgctgggcctcccaacgggccctcctcccctccttgcaccggcccttcctggtctttgaataaagtctgagtgggcag

SEQ ID NO: 98 - RNA, 108 nt, Homo sapiens
  misc_feature 1..108: note = HBA2 3'-UTR mRNA
  source 1..108: mol_type = mRNA
gctggagcctcggtagccgttcctcctgcccgctgggcctcccaacgggccctcctcccctccttgcaccggcccttcctggtctttgaataaagtctgagtgggcag

SEQ ID NO: 99 - DNA, 132 bp, Homo sapiens
  misc_feature 1..132: note = HBB-v1 3'-UTR
  source 1..132: mol_type = genomic DNA
gctcgctttcttgctgtccaatttctattaaaggttcctttgttccctaagtccaactactaaactgggggatattatgaagggccttgagcatctggattctgcctaataaaaaacatttattttcattgc

SEQ ID NO: 100 - RNA, 132 nt, Homo sapiens
  misc_feature 1..132: note = HBB-v1 3'-UTR mRNA
  source 1..132: mol_type = mRNA
gctcgctttcttgctgtccaatttctattaaaggttcctttgttccctaagtccaactactaaactgggggatattatgaagggccttgagcatctggattctgcctaataaaaaacatttattttcattgc

SEQ ID NO: 101 - DNA, 311 bp, synthetic construct
  misc_feature 1..311: note = HBB-v2 3'-UTR
  source 1..311: mol_type = other DNA
ctcgagagctcgctttcttgctgtccaatttctattaaaggttcctttgttccctaagtccaactactaaactgggggatattatgaagggccttgagcatctggattctgcctaataaaaaacatttattttcattgctgcgtcgagagctcgctttcttgctgtccaatttctattaaaggttcctttgttccctaagtccaactactaaactgggggatattatgaagggccttgagcatctggattctgcctaataaaaaacatttattttcattgctgcgtcgagacctggtccagagtcgctagc

SEQ ID NO: 102 - RNA, 311 nt, synthetic construct
  misc_feature 1..311: note = HBB-v2 3'-UTR mRNA
  source 1..311: mol_type = other RNA
ctcgagagctcgctttcttgctgtccaatttctattaaaggttcctttgttccctaagtccaactactaaactgggggatattatgaagggccttgagcatctggattctgcctaataaaaaacatttattttcattgctgcgtcgagagctcgctttcttgctgtccaatttctattaaaggttcctttgttccctaagtccaactactaaactgggggatattatgaagggccttgagcatctggattctgcctaataaaaaacatttattttcattgctgcgtcgagacctggtccagagtcgctagc

SEQ ID NO: 103 - DNA, 295 bp, synthetic construct
  misc_feature 1..295: note = AES-12S-v1 3'-UTR
  source 1..295: mol_type = other DNA
ctcgagctggtactgcatgcacgcaatgctagctgcccctttcccgtcctgggtaccccgagtctcccccgacctcgggtcccaggtatgctcccacctccacctgccccactcaccacctctgctagttccagacacctcccaagcacgcagcaatgcagctcaaaacgcttagcctagccacacccccacgggaaacagcagtgattaacctttagcaataaacgaaagtttaactaagctatactaaccccagggttggtcaatttcgtgccagccacaccctggagctagc

SEQ ID NO: 104 - RNA, 295 nt, synthetic construct
  misc_feature 1..295: note = AES-12S-v1 3'-UTR mRNA
  source 1..295: mol_type = other RNA
ctcgagctggtactgcatgcacgcaatgctagctgcccctttcccgtcctgggtaccccgagtctcccccgacctcgggtcccaggtatgctcccacctccacctgccccactcaccacctctgctagttccagacacctcccaagcacgcagcaatgcagctcaaaacgcttagcctagccacacccccacgggaaacagcagtgattaacctttagcaataaacgaaagtttaactaagctatactaaccccagggttggtcaatttcgtgccagccacaccctggagctagc

SEQ ID NO: 105 - DNA, 317 bp, synthetic construct
  misc_feature 1..317: note = AES-12S-v2 3'-UTR
  source 1..317: mol_type = other DNA
ctcgagctggtactgcatgcacgcaatgctagctgcccctttcccgtcctgggtaccccgagtctcccccgacctcgggtcccaggtatgctcccacctccacctgccccactcaccacctctgctagttccagacacctcccaagcacgcagcaatgcagctcaaaacgcttagcctagccacacccccacgggaaacagcagtgattaacctttagcaataaacgaaagtttaactaagctatactaaccccagggttggtcaatttcgtgccagccacaccgagacctggtccagagtcgctagccgcgtcgct

SEQ ID NO: 106 - RNA, 317 nt, synthetic construct
  misc_feature 1..317: note = AES-12S-v2 3'-UTR mRNA
  source 1..317: mol_type = other RNA
ctcgagctggtactgcatgcacgcaatgctagctgcccctttcccgtcctgggtaccccgagtctcccccgacctcgggtcccaggtatgctcccacctccacctgccccactcaccacctctgctagttccagacacctcccaagcacgcagcaatgcagctcaaaacgcttagcctagccacacccccacgggaaacagcagtgattaacctttagcaataaacgaaagtttaactaagctatactaaccccagggttggtcaatttcgtgccagccacaccgagacctggtccagagtcgctagccgcgtcgct

SEQ ID NO: 107 - DNA, 105 bp, synthetic construct
  misc_feature 1..105: note = GH1-v1 3'-UTR
  source 1..105: mol_type = other DNA
cgggtggcatccctgtgacccctccccagtgcctctcctggccctggaagttgccactccagtgcccaccagccttgtcctaataaaattaagttgcatcaagct

SEQ ID NO: 108 - RNA, 105 nt, synthetic construct
  misc_feature 1..105: note = GH1-v1 3'-UTR mRNA
  source 1..105: mol_type = other RNA
cgggtggcatccctgtgacccctccccagtgcctctcctggccctggaagttgccactccagtgcccaccagccttgtcctaataaaattaagttgcatcaagct

SEQ ID NO: 109 - DNA, 95 bp, synthetic construct
  misc_feature 1..95: note = PSMB3-v2 3'-UTR
  source 1..95: mol_type = other DNA
ggactagtccctgttcccagagcccacttttttttctttttttgaaataaaatagcctgtctttcagatctcaaaggctcttttcagagccacca

SEQ ID NO: 110 - RNA, 95 nt, synthetic construct
  misc_feature 1..95: note = PSMB3-v2 3'-UTR mRNA
  source 1..95: mol_type = other RNA
ggactagtccctgttcccagagcccacttttttttctttttttgaaataaaatagcctgtctttcagatctcaaaggctcttttcagagccacca

SEQ ID NO: 111 - DNA, 71 bp, synthetic construct
  misc_feature 1..71: note = PSMB3-v3 3'-UTR
  source 1..71: mol_type = other DNA
ggactagtccctgttcccagagcccacttttttttctttttttgaaataaaatagcctgtctttcagatct

SEQ ID NO: 112 - RNA, 71 nt, synthetic construct
  misc_feature 1..71: note = PSMB3-v3 3'-UTR mRNA
  source 1..71: mol_type = other RNA
ggactagtccctgttcccagagcccacttttttttctttttttgaaataaaatagcctgtctttcagatct

SEQ ID NO: 113 - DNA, 195 bp, synthetic construct
  misc_feature 1..195: note = PSMB3-v4 3'-UTR
  source 1..195: mol_type = other DNA
ggactagtccctgttcccagagcccacttttttttctttttttgaaataaaatagcctgtctttcagatctcaaaggctcttttcagagccaccaaaaaaaaaaaaaaaaaaaaaaaaaaaaaaaaaaaaaaaaaaaaaaaaaaaaaaaaaaaaaaaaaaaaaaaaaaaaaaaaaaaaaaaaaaaaaaaaaaaaa

SEQ ID NO: 114 - RNA, 195 nt, synthetic construct
  misc_feature 1..195: note = PSMB3-v42 3'-UTR
  source 1..195: mol_type = other RNA
ggactagtccctgttcccagagcccacttttttttctttttttgaaataaaatagcctgtctttcagatctcaaaggctcttttcagagccaccaaaaaaaaaaaaaaaaaaaaaaaaaaaaaaaaaaaaaaaaaaaaaaaaaaaaaaaaaaaaaaaaaaaaaaaaaaaaaaaaaaaaaaaaaaaaaaaaaaaaa

SEQ ID NO: 115 - DNA, 171 bp, synthetic construct
  misc_feature 1..171: note = PSMB3-v5 3'-UTR
  source 1..171: mol_type = other DNA
ggactagtccctgttcccagagcccacttttttttctttttttgaaataaaatagcctgtctttcagatctaaaaaaaaaaaaaaaaaaaaaaaaaaaaaaaaaaaaaaaaaaaaaaaaaaaaaaaaaaaaaaaaaaaaaaaaaaaaaaaaaaaaaaaaaaaaaaaaaaaa

SEQ ID NO: 116 - RNA, 171 nt, synthetic construct
  misc_feature 1..171: note = PSMB3-v5 3'-UTR
  source 1..171: mol_type = other RNA
ggactagtccctgttcccagagcccacttttttttctttttttgaaataaaatagcctgtctttcagatctaaaaaaaaaaaaaaaaaaaaaaaaaaaaaaaaaaaaaaaaaaaaaaaaaaaaaaaaaaaaaaaaaaaaaaaaaaaaaaaaaaaaaaaaaaaaaaaaaaaa

SEQ ID NO: 117 - DNA, 200 bp, synthetic construct
  misc_feature 1..200: note = PSMB3-v6 3'-UTR
  source 1..200: mol_type = other DNA
ggactagtccctgttcccagagcccacttttttttctttttttgaaataaaatagcctgtctttcagatctcaaaggctcttttcagagccaccaaaaaaaaaaaaaaaaaaaaaaaaaaaaaaaaaaaaaaaaaaaaaaaaaaaaaaaaaaaaaaaaaaaaaaaaaaaaaaaaaaaaaaaaaaaaaaaaaaaaagaatt

SEQ ID NO: 118 - RNA, 200 nt, synthetic construct
  misc_feature 1..200: note = PSMB3-v62 3'-UTR
  source 1..200: mol_type = other RNA
ggactagtccctgttcccagagcccacttttttttctttttttgaaataaaatagcctgtctttcagatctcaaaggctcttttcagagccaccaaaaaaaaaaaaaaaaaaaaaaaaaaaaaaaaaaaaaaaaaaaaaaaaaaaaaaaaaaaaaaaaaaaaaaaaaaaaaaaaaaaaaaaaaaaaaaaaaaaaagaatt

SEQ ID NO: 119 - DNA, 176 bp, synthetic construct
  misc_feature 1..176: note = PSMB3-v7 3'-UTR
  source 1..176: mol_type = other DNA
ggactagtccctgttcccagagcccacttttttttctttttttgaaataaaatagcctgtctttcagatctaaaaaaaaaaaaaaaaaaaaaaaaaaaaaaaaaaaaaaaaaaaaaaaaaaaaaaaaaaaaaaaaaaaaaaaaaaaaaaaaaaaaaaaaaaaaaaaaaaaagaatt

SEQ ID NO: 120 - RNA, 176 nt, synthetic construct
  misc_feature 1..176: note = PSMB3-v7 3'-UTR
  source 1..176: mol_type = other RNA
ggactagtccctgttcccagagcccacttttttttctttttttgaaataaaatagcctgtctttcagatctaaaaaaaaaaaaaaaaaaaaaaaaaaaaaaaaaaaaaaaaaaaaaaaaaaaaaaaaaaaaaaaaaaaaaaaaaaaaaaaaaaaaaaaaaaaaaaaaaaaagaatt

SEQ ID NO: 121-127 - skipped (7 entries)

SEQ ID NO: 128 - DNA, 13 bp, synthetic construct
  misc_feature 1..13: note = Kozak sequence
  source 1..13: mol_type = other DNA
gccgccaccatgg

SEQ ID NO: 129 - RNA, 13 nt, synthetic construct
  misc_feature 1..13: note = Kozak sequence mRNA
  source 1..13: mol_type = other RNA
gccgccaccatgg

SEQ ID NO: 130-135 - skipped (6 entries)

SEQ ID NO: 136 - DNA, 24 bp, synthetic construct
  misc_feature 1..24: note = histone stem-loop sequence (histoneSL, hSL)
  source 1..24: mol_type = other DNA
caaaggctcttttcagagccacca

SEQ ID NO: 137 - RNA, 24 nt, synthetic construct
  misc_feature 1..24: note = histone stem-loop sequence (histoneSL, hSL) mRNA
  source 1..24: mol_type = other RNA
caaaggctcttttcagagccacca

SEQ ID NO: 138 - RNA, 128 nt, synthetic construct
  misc_feature 1..128: note = mRNA 3'-end A64-N5-C30-histoneSL-N5
  source 1..128: mol_type = other RNA
aaaaaaaaaaaaaaaaaaaaaaaaaaaaaaaaaaaaaaaaaaaaaaaaaaaaaaaaaaaaaaaatgcatcccccccccccccccccccccccccccccccaaaggctcttttcagagccaccagaatt

SEQ ID NO: 139 - RNA, 98 nt, synthetic construct
  misc_feature 1..98: note = mRNA 3'-end A64-N5-histoneSL-N5
  source 1..98: mol_type = other RNA
aaaaaaaaaaaaaaaaaaaaaaaaaaaaaaaaaaaaaaaaaaaaaaaaaaaaaaaaaaaaaaaatgcatcaaaggctcttttcagagccaccagaatt

SEQ ID NO: 140 - RNA, 129 nt, synthetic construct
  misc_feature 1..129: note = mRNA 3'-end histoneSL-A100-N5
  source 1..129: mol_type = other RNA
caaaggctcttttcagagccaccaaaaaaaaaaaaaaaaaaaaaaaaaaaaaaaaaaaaaaaaaaaaaaaaaaaaaaaaaaaaaaaaaaaaaaaaaaaaaaaaaaaaaaaaaaaaaaaaaaaaagaatt

SEQ ID NO: 141 - RNA, 93 nt, synthetic construct
  misc_feature 1..93: note = mRNA 3'-end histoneSL-A64-N5
  source 1..93: mol_type = other RNA
caaaggctcttttcagagccaccaaaaaaaaaaaaaaaaaaaaaaaaaaaaaaaaaaaaaaaaaaaaaaaaaaaaaaaaaaaaaaaaagaatt

SEQ ID NO: 142 - RNA, 105 nt, synthetic construct
  misc_feature 1..105: note = mRNA 3'-end A100-N5
  source 1..105: mol_type = other RNA
aaaaaaaaaaaaaaaaaaaaaaaaaaaaaaaaaaaaaaaaaaaaaaaaaaaaaaaaaaaaaaaaaaaaaaaaaaaaaaaaaaaaaaaaaaaaaaaaaaaagaatt

SEQ ID NO: 143 - RNA, 69 nt, synthetic construct
  misc_feature 1..69: note = mRNA 3'-end A64-N5
  source 1..69: mol_type = other RNA
aaaaaaaaaaaaaaaaaaaaaaaaaaaaaaaaaaaaaaaaaaaaaaaaaaaaaaaaaaaaaaaagaatt

SEQ ID NO: 144 - RNA, 124 nt, synthetic construct
  misc_feature 1..124: note = mRNA 3'-end histoneSL-A100
  source 1..124: mol_type = other RNA
caaaggctcttttcagagccaccaaaaaaaaaaaaaaaaaaaaaaaaaaaaaaaaaaaaaaaaaaaaaaaaaaaaaaaaaaaaaaaaaaaaaaaaaaaaaaaaaaaaaaaaaaaaaaaaaaaaa

SEQ ID NO: 145 - RNA, 88 nt, synthetic construct
  misc_feature 1..88: note = mRNA 3'-end histoneSL-A64
  source 1..88: mol_type = other RNA
caaaggctcttttcagagccaccaaaaaaaaaaaaaaaaaaaaaaaaaaaaaaaaaaaaaaaaaaaaaaaaaaaaaaaaaaaaaaaaa

SEQ ID NO: 146 - RNA, 100 nt, synthetic construct
  misc_feature 1..100: note = mRNA 3'-end A100
  source 1..100: mol_type = other RNA
aaaaaaaaaaaaaaaaaaaaaaaaaaaaaaaaaaaaaaaaaaaaaaaaaaaaaaaaaaaaaaaaaaaaaaaaaaaaaaaaaaaaaaaaaaaaaaaaaaaa

SEQ ID NO: 147 - RNA, 64 nt, synthetic construct
  misc_feature 1..64: note = mRNA 3'-end A64
  source 1..64: mol_type = other RNA
aaaaaaaaaaaaaaaaaaaaaaaaaaaaaaaaaaaaaaaaaaaaaaaaaaaaaaaaaaaaaaaa

SEQ ID NO: 148 - RNA, 93 nt, synthetic construct
  misc_feature 1..93: note = mRNA 3'-end A64-histoneSL-N5
  source 1..93: mol_type = other RNA
aaaaaaaaaaaaaaaaaaaaaaaaaaaaaaaaaaaaaaaaaaaaaaaaaaaaaaaaaaaaaaaacaaaggctcttttcagagccaccagaatt

SEQ ID NO: 149 - RNA, 134 nt, synthetic construct
  misc_feature 1..134: note = mRNA 3'-end N6-A64-N5-C30-histoneSL-N5
  source 1..134: mol_type = other RNA
attaataaaaaaaaaaaaaaaaaaaaaaaaaaaaaaaaaaaaaaaaaaaaaaaaaaaaaaaaaaaaaaaatgcatcccccccccccccccccccccccccccccccaaaggctcttttcagagccaccagaatt

SEQ ID NO: 150 - RNA, 134 nt, synthetic construct
  misc_feature 1..134: note = mRNA 3'-end N6-A64-N5-C30-histoneSL-N5
  source 1..134: mol_type = other RNA
agatctaaaaaaaaaaaaaaaaaaaaaaaaaaaaaaaaaaaaaaaaaaaaaaaaaaaaaaaaaaaaaaaatgcatcccccccccccccccccccccccccccccccaaaggctcttttcagagccaccagaatt

SEQ ID NO: 151 - RNA, 104 nt, synthetic construct
  misc_feature 1..104: note = mRNA 3'-end A64-N5-histoneSL-N5
  source 1..104: mol_type = other RNA
attaataaaaaaaaaaaaaaaaaaaaaaaaaaaaaaaaaaaaaaaaaaaaaaaaaaaaaaaaaaaaaaaatgcatcaaaggctcttttcagagccaccagaatt

SEQ ID NO: 152 - RNA, 104 nt, synthetic construct
  misc_feature 1..104: note = mRNA 3'-end A64-N5-histoneSL-N5
  source 1..104: mol_type = other RNA
agatctaaaaaaaaaaaaaaaaaaaaaaaaaaaaaaaaaaaaaaaaaaaaaaaaaaaaaaaaaaaaaaaatgcatcaaaggctcttttcagagccaccagaatt

SEQ ID NO: 153 - RNA, 135 nt, synthetic construct
  misc_feature 1..135: note = mRNA 3'-end N6-histoneSL-A100-N5
  source 1..135: mol_type = other RNA
attaatcaaaggctcttttcagagccaccaaaaaaaaaaaaaaaaaaaaaaaaaaaaaaaaaaaaaaaaaaaaaaaaaaaaaaaaaaaaaaaaaaaaaaaaaaaaaaaaaaaaaaaaaaaaaaaaaaaaagaatt

SEQ ID NO: 154 - RNA, 135 nt, synthetic construct
  misc_feature 1..135: note = mRNA 3'-end N6-histoneSL-A100-N5
  source 1..135: mol_type = other RNA
agatctcaaaggctcttttcagagccaccaaaaaaaaaaaaaaaaaaaaaaaaaaaaaaaaaaaaaaaaaaaaaaaaaaaaaaaaaaaaaaaaaaaaaaaaaaaaaaaaaaaaaaaaaaaaaaaaaaaaagaatt

SEQ ID NO: 155 - RNA, 99 nt, synthetic construct
  misc_feature 1..99: note = mRNA 3'-end N6-histoneSL-A64-N5
  source 1..99: mol_type = other RNA
attaatcaaaggctcttttcagagccaccaaaaaaaaaaaaaaaaaaaaaaaaaaaaaaaaaaaaaaaaaaaaaaaaaaaaaaaaaaaaaaaaagaatt

SEQ ID NO: 156 - RNA, 99 nt, synthetic construct
  misc_feature 1..99: note = mRNA 3'-end N6-histoneSL-A64-N5
  source 1..99: mol_type = other RNA
agatctcaaaggctcttttcagagccaccaaaaaaaaaaaaaaaaaaaaaaaaaaaaaaaaaaaaaaaaaaaaaaaaaaaaaaaaaaaaaaaaagaatt

SEQ ID NO: 157 - RNA, 111 nt, synthetic construct
  misc_feature 1..111: note = mRNA 3'-end N6-A100-N5
  source 1..111: mol_type = other RNA
attaataaaaaaaaaaaaaaaaaaaaaaaaaaaaaaaaaaaaaaaaaaaaaaaaaaaaaaaaaaaaaaaaaaaaaaaaaaaaaaaaaaaaaaaaaaaaaaaaaaaagaatt

SEQ ID NO: 158 - RNA, 111 nt, synthetic construct
  misc_feature 1..111: note = mRNA 3'-end N6-A100-N5
  source 1..111: mol_type = other RNA
agatctaaaaaaaaaaaaaaaaaaaaaaaaaaaaaaaaaaaaaaaaaaaaaaaaaaaaaaaaaaaaaaaaaaaaaaaaaaaaaaaaaaaaaaaaaaaaaaaaaaaagaatt

SEQ ID NO: 159 - RNA, 75 nt, synthetic construct
  misc_feature 1..75: note = mRNA 3'-end N6-A64-N5
  source 1..75: mol_type = other RNA
attaataaaaaaaaaaaaaaaaaaaaaaaaaaaaaaaaaaaaaaaaaaaaaaaaaaaaaaaaaaaaaaaagaatt

SEQ ID NO: 160 - RNA, 75 nt, synthetic construct
  misc_feature 1..75: note = mRNA 3'-end N6-A64-N5
  source 1..75: mol_type = other RNA
agatctaaaaaaaaaaaaaaaaaaaaaaaaaaaaaaaaaaaaaaaaaaaaaaaaaaaaaaaaaaaaaaaagaatt

SEQ ID NO: 161 - RNA, 130 nt, synthetic construct
  misc_feature 1..130: note = mRNA 3'-end N6-histoneSL-A100
  source 1..130: mol_type = other RNA
attaatcaaaggctcttttcagagccaccaaaaaaaaaaaaaaaaaaaaaaaaaaaaaaaaaaaaaaaaaaaaaaaaaaaaaaaaaaaaaaaaaaaaaaaaaaaaaaaaaaaaaaaaaaaaaaaaaaaaa

SEQ ID NO: 162 - RNA, 130 nt, synthetic construct
  misc_feature 1..130: note = mRNA 3'-end N6-histoneSL-A100
  source 1..130: mol_type = other RNA
agatctcaaaggctcttttcagagccaccaaaaaaaaaaaaaaaaaaaaaaaaaaaaaaaaaaaaaaaaaaaaaaaaaaaaaaaaaaaaaaaaaaaaaaaaaaaaaaaaaaaaaaaaaaaaaaaaaaaaa

SEQ ID NO: 163 - RNA, 94 nt, synthetic construct
  misc_feature 1..94: note = mRNA 3'-end N6-histoneSL-A64
  source 1..94: mol_type = other RNA
attaatcaaaggctcttttcagagccaccaaaaaaaaaaaaaaaaaaaaaaaaaaaaaaaaaaaaaaaaaaaaaaaaaaaaaaaaaaaaaaaaa

SEQ ID NO: 164 - RNA, 94 nt, synthetic construct
  misc_feature 1..94: note = mRNA 3'-end N6-histoneSL-A64
  source 1..94: mol_type = other RNA
agatctcaaaggctcttttcagagccaccaaaaaaaaaaaaaaaaaaaaaaaaaaaaaaaaaaaaaaaaaaaaaaaaaaaaaaaaaaaaaaaaa

SEQ ID NO: 165 - RNA, 106 nt, synthetic construct
  misc_feature 1..106: note = mRNA 3'-end N6-A100
  source 1..106: mol_type = other RNA
attaataaaaaaaaaaaaaaaaaaaaaaaaaaaaaaaaaaaaaaaaaaaaaaaaaaaaaaaaaaaaaaaaaaaaaaaaaaaaaaaaaaaaaaaaaaaaaaaaaaaa

SEQ ID NO: 166 - RNA, 106 nt, synthetic construct
  misc_feature 1..106: note = mRNA 3'-end N6-A100
  source 1..106: mol_type = other RNA
agatctaaaaaaaaaaaaaaaaaaaaaaaaaaaaaaaaaaaaaaaaaaaaaaaaaaaaaaaaaaaaaaaaaaaaaaaaaaaaaaaaaaaaaaaaaaaaaaaaaaaa

SEQ ID NO: 167 - RNA, 70 nt, synthetic construct
  misc_feature 1..70: note = mRNA 3'-end N6-A64
  source 1..70: mol_type = other RNA
attaataaaaaaaaaaaaaaaaaaaaaaaaaaaaaaaaaaaaaaaaaaaaaaaaaaaaaaaaaaaaaaaa

SEQ ID NO: 168 - RNA, 70 nt, synthetic construct
  misc_feature 1..70: note = mRNA 3'-end N6-A64
  source 1..70: mol_type = other RNA
agatctaaaaaaaaaaaaaaaaaaaaaaaaaaaaaaaaaaaaaaaaaaaaaaaaaaaaaaaaaaaaaaaa

SEQ ID NO: 169 - RNA, 99 nt, synthetic construct
  misc_feature 1..99: note = mRNA 3'-end N6-A64-histoneSL-N5
  source 1..99: mol_type = other RNA
attaataaaaaaaaaaaaaaaaaaaaaaaaaaaaaaaaaaaaaaaaaaaaaaaaaaaaaaaaaaaaaaaacaaaggctcttttcagagccaccagaatt

SEQ ID NO: 170 - RNA, 99 nt, synthetic construct
  misc_feature 1..99: note = mRNA 3'-end N6-A64-histoneSL-N5
  source 1..99: mol_type = other RNA
agatctaaaaaaaaaaaaaaaaaaaaaaaaaaaaaaaaaaaaaaaaaaaaaaaaaaaaaaaaaaaaaaaacaaaggctcttttcagagccaccagaatt

SEQ ID NO: 171 - RNA, 105 nt, synthetic construct
  misc_feature 1..105: note = mRNA 3'-end A100-N5
  source 1..105: mol_type = other RNA
aaaaaaaaaaaaaaaaaaaaaaaaaaaaaaaaaaaaaaaaaaaaaaaaaaaaaaaaaaaaaaaaaaaaaaaaaaaaaaaaaaaaaaaaaaaaaaaaaaaatctag

SEQ ID NO: 172 - RNA, 110 nt, synthetic construct
  misc_feature 1..110: note = mRNA 3'-end A30-N10-A70
  source 1..110: mol_type = other RNA
aaaaaaaaaaaaaaaaaaaaaaaaaaaaaagcatatgactaaaaaaaaaaaaaaaaaaaaaaaaaaaaaaaaaaaaaaaaaaaaaaaaaaaaaaaaaaaaaaaaaaaaaa

SEQ ID NO: 173 - protein, 188 aa, synthetic construct
  REGION 1..188: note = Artificial____mAb-926_VH protein
QVQLQQSGAELATPGASVKMSCKASGYTSTNYWIHWVKQRPGQGLEWIGYINPTSGYTEYNQNFKDKATLTADKSSSTAYMQLTSLTSEDSAVYYCARGVIRDFWGQGTTLTVSSAKTTAPSVYPLAPVCGDTTGSSVTLGCLVKGYFPEPVTLTWNSGSLSSGVHTFPAVLQSDLYTLSSSVTVTSS

SEQ ID NO: 174 - protein, 112 aa, synthetic construct
  REGION 1..112: note = Artificial____mAb-926_VL(kappa) protein
DVLMTQTPLSLPVSLGDQASISCRSSQNIVHNNGNTYLEWYLQSPGQSPKLLIYKVSNRFSGVPDRFSGSGSGTDFTLKISRVEAEDLGVYYCFQGSHVPFTFGSGTKLEIK

SEQ ID NO: 175 - protein, 191 aa, synthetic construct
  REGION 1..191: note = Artificial____mAb-475_VH protein
QVQLQQSGAELVRPGSSVKISCKASGYAFSSYWMNWVKQRPGQGLEWIGQIYPRDGDTNYNGKFMDKVTLTADKSSNTAYMQLSSLTSEDSAVYFCEVGRGFYGMDYWGQGTSVTVSSAKTTAPSVYPLAPVCGDTTGSSVTLGCLVKGYFPEPVTLTWNSGSLSSGVHTFPAVLQSDLYTLSSSVTVTSS

SEQ ID NO: 176 - protein, 106 aa, synthetic construct
  REGION 1..106: note = Artificial____mAb-475_VL(kappa) protein
DIVMTQSPKFMSTSVGDRVSVTCKASQNVSNVAWYQQKPGQSPKAMIYSASYRYSGVPGRFTGSGSGTDFTLTINNVQSEDLATYFCQQNSSFPFTFGGGTKLEIK

SEQ ID NO: 177 - protein, 300 aa, Escherichia coli
  REGION 1..300: note = Escherichia coli J96__ELL41155.1__Ec(J96)-FimH protein
MKRVITLFAVLLMGWSVNAWSFACKTANGTAIPIGGGSANVYVNLAPVVNVGQNLVVDLSTQIFCHNDYPETITDYVTLQRGSAYGGVLSNFSGTVKYSGSSYPFPTTSETPRVVYNSRTDKPWPVALYLTPVSSAGGVAIKAGSLIAVLILRQTNNYNSDDFQFVWNIYANNDVVVPTGGCDVSARDVTVTLPDYPGSVPIPLTVYCAKSQNLGYYLSGTTADAGNSIFTNTASFSPAQGVGVQLTRNGTIIPANNTVSLGAVGTSAVSLGLTANYARTGGQVTAGNVQSIIGVTFVYQ

SEQ ID NO: 178 - protein, 300 aa, Escherichia coli
  REGION 1..300: note = Escherichia coli 536__ABG72591.1__Ec(536)-FimH protein
MKRVITLFAVLLMGWSVNAWSFACKTANGTAIPIGGGSANVYVNLAPAVNVGQNLVVDLSTQIFCHNDYPETITDYVTLQRGSAYGGVLSSFSGTVKYNGSSYPFPTTSETPRVVYNSRTDKPWPVALYLTPVSSAGGVAIKAGSLIAVLILRQTNNYNSDDFQFVWNIYANNDVVVPTGGCDVSARDVTVTLPDYPGSVPIPLTVYCAKSQNLGYYLSGTTADAGNSIFTNTASFSPAQGVGVQLTRNGTIIPANNTVSLGAVGTSAVSLGLTANYARTGGQVTAGNVQSIIGVTFVYQ

SEQ ID NO: 179 - protein, 300 aa, Escherichia coli
  REGION 1..300: note = Escherichia coli CFT073__AAN83822.1__Ec(CFT073)-FimH protein
MKRVITLFAVLLMGWSVNAWSFACKTANGTAIPIGGGSANVYVNLAPAVNVGQNLVVDLSTQIFCHNDYPETITDYVTLQRGSAYGGVLSSFSGTVKYNGSSYPFPTTSETPRVVYNSRTDKPWPVALYLTPVSSAGGVAIKAGSLIAVLILRQTNNYNSDDFQFVWNIYANNDVVVPTGGCDASARDVTVTLPDYPGSVPIPLTVYCAKSQNLGYYLSGTTADAGNSIFTNTASFSPAQGVGVQLTRNGTIIPANNTVSLGAVGTSAVSLGLTANYARTGGQVTAGNVQSIIGVTFVYQ

SEQ ID NO: 180 - protein, 300 aa, Escherichia coli
  REGION 1..300: note = Escherichia coli IHE3034__AAC35864.1__Ec(IHE3034)-FimH protein
MKRVITLFAVLLMGWSVNAWSFACKTANGTAIPIGGGSANVYVNLAPAVNVGQNLVVDLSTQIFCHNDYPETITDYVTLQRGAAYGGVLSSFSGTVKYNGSSYPFPTTSETPRVVYNSRTDKPWPVALYLTPVSSAGGVAIKAGSLIAVLILRQTNNYNSDDFQFVWNIYANNDVVVPTGGCDVSARDVTVTLPDYPGSVPIPLTVYCAKSQNLGYYLSGTTADAGNSIFTNTASFSPAQGVGVQLTRNGTIIPANNTVSLGAVGTSAVSLGLTANYARTGGQVTAGNVQSIIGVTFVYQ

SEQ ID NO: 181 - protein, 300 aa, Escherichia coli
  REGION 1..300: note = Escherichia coli NA114__AEG39414.1__Ec(NA114)-FimH protein
MKRVITLFAVLLMGWSVNAWSFACKTANGTAIPIGGGSANVYVNLAPAVNVGQNLVVDLSTQIFCHNDYPETITDYVTLQRGSAYGGVLSNFSGTVKYSGSSYPFPTTSETPRVVYNSRTDKPWPVALYLTPVSSAGGVAIKAGSLIAVLILRQTNNYNSDDFQFVWNIYANNDVVVPTGGCDVSAHDVTVTLPDYPGSVPIPLTVYCAKSQNLGYYLSGTTADAGNSIFTNTASFSPAQGVGVQLTRNGTIIPANNTVSLGAVGTSAVSLGLTANYARTGGQVTAGNVQSIIGVTFVYQ

SEQ ID NO: 182 - protein, 300 aa, Escherichia coli
  REGION 1..300: note = Escherichia coli F11__WP_000832233.1__Ec(F11)-FimH protein
MKRVITLFAVLLMGWSVNAWSFACKTANGTAIPIGGGSANVYVNLAPAVNVGQNLVVDLSTQIFCHNDYPETITDYVTLQRGSAYGGVLSSFSGIVKYNGSSYPFPTTSETPRVVYNSRTDKPWPVALYLTPVSSAGGVAIKAGSLIAVLILRQTNNYNSDDFQFVWNIYANNDVVVPTGGCDVSARDVTVTLPDYPGSVPIPLTVYCAKSQNLGYYLSGTTADAGNSIFTNTASFSPAQGVGVQLTRNGTIIPANNTVSLGAVGTSAVSLGLTANYARTGGQVTAGNVQSIIGVTFVYQ

SEQ ID NO: 183 - protein, 300 aa, synthetic construct
  REGION 1..300: note = Escherichia coli J96__ELL41155.1__Ec(J96)-FimH(N28S_N91S_N249Q) protein
MKRVITLFAVLLMGWSVNAWSFACKTASGTAIPIGGGSANVYVNLAPVVNVGQNLVVDLSTQIFCHNDYPETITDYVTLQRGSAYGGVLSSFSGTVKYSGSSYPFPTTSETPRVVYNSRTDKPWPVALYLTPVSSAGGVAIKAGSLIAVLILRQTNNYNSDDFQFVWNIYANNDVVVPTGGCDVSARDVTVTLPDYPGSVPIPLTVYCAKSQNLGYYLSGTTADAGNSIFTNTASFSPAQGVGVQLTRQGTIIPANNTVSLGAVGTSAVSLGLTANYARTGGQVTAGNVQSIIGVTFVYQ

SEQ ID NO: 184 - protein, 300 aa, synthetic construct
  REGION 1..300: note = Escherichia coli J96__ELL41155.1__Ec(J96)-FimH(N28S_N91S_N249Q_N256D) protein
MKRVITLFAVLLMGWSVNAWSFACKTASGTAIPIGGGSANVYVNLAPVVNVGQNLVVDLSTQIFCHNDYPETITDYVTLQRGSAYGGVLSSFSGTVKYSGSSYPFPTTSETPRVVYNSRTDKPWPVALYLTPVSSAGGVAIKAGSLIAVLILRQTNNYNSDDFQFVWNIYANNDVVVPTGGCDVSARDVTVTLPDYPGSVPIPLTVYCAKSQNLGYYLSGTTADAGNSIFTNTASFSPAQGVGVQLTRQGTIIPADNTVSLGAVGTSAVSLGLTANYARTGGQVTAGNVQSIIGVTFVYQ

SEQ ID NO: 185 - protein, 300 aa, synthetic construct
  REGION 1..300: note = Escherichia coli J96__ELL41155.1__Ec(J96)-FimH(N28S_V48C_L55C_N91S_N249Q) protein
MKRVITLFAVLLMGWSVNAWSFACKTASGTAIPIGGGSANVYVNLAPCVNVGQNCVVDLSTQIFCHNDYPETITDYVTLQRGSAYGGVLSSFSGTVKYSGSSYPFPTTSETPRVVYNSRTDKPWPVALYLTPVSSAGGVAIKAGSLIAVLILRQTNNYNSDDFQFVWNIYANNDVVVPTGGCDVSARDVTVTLPDYPGSVPIPLTVYCAKSQNLGYYLSGTTADAGNSIFTNTASFSPAQGVGVQLTRQGTIIPANNTVSLGAVGTSAVSLGLTANYARTGGQVTAGNVQSIIGVTFVYQ

SEQ ID NO: 186 - protein, 300 aa, synthetic construct
  REGION 1..300: note = Escherichia coli J96__ELL41155.1__Ec(J96)-FimH(F165V) protein
MKRVITLFAVLLMGWSVNAWSFACKTANGTAIPIGGGSANVYVNLAPVVNVGQNLVVDLSTQIFCHNDYPETITDYVTLQRGSAYGGVLSNFSGTVKYSGSSYPFPTTSETPRVVYNSRTDKPWPVALYLTPVSSAGGVAIKAGSLIAVLILRQTNNYNSDDFQVVWNIYANNDVVVPTGGCDVSARDVTVTLPDYPGSVPIPLTVYCAKSQNLGYYLSGTTADAGNSIFTNTASFSPAQGVGVQLTRNGTIIPANNTVSLGAVGTSAVSLGLTANYARTGGQVTAGNVQSIIGVTFVYQ

SEQ ID NO: 187 - RNA, 903 nt, Escherichia coli
  misc_feature 1..903: note = Escherichia coli J96__ELL41155.1__Ec(J96)-FimH CDS wt
  source 1..903: mol_type = mRNA
atgaaacgagttattaccctgtttgctgtactgctgatgggctggtcggtaaatgcctggtcattcgcctgtaaaaccgccaatggtaccgctatccctattggcggtggcagcgccaatgtttatgtaaaccttgcgcccgtcgtgaatgtggggcaaaacctggtcgtggatctttcgacgcaaatcttttgccataacgattatccggaaaccattacagactatgtcacactgcaacgaggctcggcttatggcggcgtgttatctaatttttccgggaccgtaaaatatagtggcagtagctatccatttcctaccaccagcgaaacgccgcgcgttgtttataattcgagaacggataagccgtggccggtggcgctttatttgacgcctgtgagcagtgcgggcggggtggcgattaaagctggctcattaattgccgtgcttattttgcgacagaccaacaactataacagcgatgatttccagtttgtgtggaatatttacgccaataatgatgtggtggtgcctactggcggctgcgatgtttctgctcgtgatgtcaccgttactctgccggactaccctggttcagtgccaattcctcttaccgtttattgtgcgaaaagccaaaacctggggtattacctctccggcacaaccgcagatgcgggcaactcgattttcaccaataccgcgtcgttttcacctgcacagggcgtcggcgtacagttgacgcgcaacggtacgattattccagcgaataacacggtatcgttaggagcagtagggacttcggcggtgagtctgggattaacggcaaattatgcacgtaccggagggcaggtgactgcagggaatgtgcaatcgattattggcgtgacttttgtttatcaataa

SEQ ID NO: 188 - RNA, 912 nt, Escherichia coli
  misc_feature 1..912: note = Escherichia coli 536__ABG72591.1__Ec(536)-FimH CDS wt
  source 1..912: mol_type = mRNA
atgattgtaatgaaacgagttattaccctgtttgctgtactgctgatgggctggtcggtaaatgcctggtcattcgcctgtaaaaccgccaatggtaccgctatccctattggtggtggcagcgccaatgtttatgtaaaccttgcgcctgccgtgaatgtggggcaaaacctggtcgtggatctttcgacgcaaatcttttgccataacgattacccggaaaccattacagactatgtcacactgcaacgaggttcggcttatggcggcgtgttatctagtttttccgggaccgtaaaatataatggcagtagctatcctttccctactaccagcgaaacgccgcgggttgtttataattcgagaacggataagccgtggccggtggcgctttatttgacgcctgtgagcagtgcggggggagtggcgattaaagctggctcattaattgccgtgcttattttgcgacagaccaacaactataacagcgatgatttccagtttgtgtggaatatttacgccaataatgatgtggtggtgcccactggcggctgtgatgtttctgctcgtgatgtcaccgttactttgccggactaccctggttcagtgccgattcctcttaccgtttattgtgcgaaaagccaaaacctggggtattacctctccggcacaaccgcagatgcgggcaactcgattttcaccaataccgcgtcgttttcacccgcgcagggcgtcggcgtacagttgacgcgcaacggtacgattattccagcgaataacacggtatcgttaggagcagtagggacttcggcggtaagtctgggattaacggcaaattacgcacgtaccggagggcaggtgactgcagggaatgtgcaatcgattattggcgtgacttttgtttatcaataa

SEQ ID NO: 189 - RNA, 912 nt, Escherichia coli
  misc_feature 1..912: note = Escherichia coli CFT073__AAN83822.1__Ec(CFT073)-FimH CDS wt
  source 1..912: mol_type = mRNA
atgattgtaatgaaacgagttattaccctgtttgctgtactgctgatgggctggtcggtaaatgcctggtcattcgcctgtaaaaccgccaatggtaccgcaatccctattggcggtggcagcgccaatgtttatgtaaaccttgcgcctgccgtgaatgtggggcaaaacctggtcgtagatctttcgacgcaaatcttttgccataacgattacccagaaaccattacagactatgtcacactgcaacgaggttcggcttatggcggcgtgttatctagtttttccgggaccgtaaaatataatggcagtagctatcctttccctactaccagcgaaacgccgcgggttgtttataattcgagaacggataagccgtggccggtggcgctttatttgacgccggtgagcagtgcggggggagtggcgattaaagctggctcattaattgccgtgcttattttgcgacagaccaacaactataacagcgatgatttccagtttgtgtggaatatttacgccaataatgatgtggtggtgcccactggcggctgtgatgcttctgctcgtgatgtcaccgttactctgccggactaccctggttcagtgccgattcctcttaccgtttattgtgcgaaaagccaaaacctggggtattacctatccggcacaaccgcagatgcgggcaactcgattttcaccaataccgcgtcgttttcacccgcgcagggcgtcggcgtacagttgacgcgcaacggtacgattattccagcgaataacacggtatcgttaggagcagtagggacttcggcggtaagtctgggattaacggcaaattacgcacgtaccggagggcaggtgactgcagggaatgtgcaatcgattattggcgtgacttttgtttatcaataa

SEQ ID NO: 190 - RNA, 903 nt, Escherichia coli
  misc_feature 1..903: note = Escherichia coli IHE3034__AAC35864.1__Ec(IHE3034)-FimH CDS wt
  source 1..903: mol_type = mRNA
atgaaacgagttattaccctgtttgctgtactgctgatgggctggtcggtaaatgcctggtcattcgcctgtaaaaccgccaatggtaccgcaatccctattggcggtggcagcgccaatgtttatgtaaaccttgcgcctgccgtgaatgtggggcaaaacctggtcgtagatctttcgacgcaaatcttttgccataacgattacccagaaaccattacagactatgtcacactgcaacgaggtgcggcttatggcggcgtgttatctagtttttccgggaccgtaaaatataatggcagtagctatcctttccctactaccagcgaaacgccgcgggttgtttataattcgagaacggataagccgtggccggtggcgctttatttgacgccggtgagcagtgcggggggagtggcgattaaagctggctcattaattgccgtgcttattttgcgacagaccaacaactataacagcgatgatttccagtttgtgtggaatatttacgccaataatgatgtggtggtgcccactggcggctgcgatgtttctgctcgtgatgtcaccgttactctgccggactaccctggttcagtgccgattcctcttaccgtttattgtgcgaaaagccaaaacctggggtattacctctccggcacaaccgcagatgcgggcaactcgattttcaccaataccgcgtcgttttcacccgcgcagggcgtcggcgtacagttgacgcgcaacggtacgattattccagcgaataacacggtatcgttaggagcagtagggacttcggcggtaagtctgggattaacggcaaattacgcacgtaccggagggcaggtgactgcagggaatgtgcaatcgattattggcgtgacttttgtttatcaataa

SEQ ID NO: 191 - RNA, 903 nt, Escherichia coli
  misc_feature 1..903: note = Escherichia coli NA114__AEG39414.1__Ec(NA114)-FimH CDS wt
  source 1..903: mol_type = mRNA
atgaaacgagttattaccctgtttgctgtactgctgatgggctggtcggtaaatgcctggtcattcgcctgtaaaaccgccaatggtaccgctattcctattggcggtggcagcgctaatgtttatgtaaaccttgcgcctgccgtgaatgtggggcaaaacctggtcgtagatctttcgacgcaaatcttttgccataacgattatccggaaaccattacagactatgtcacactgcaacgaggctcggcttatggcggcgtgttatctaatttttccgggaccgtaaaatatagtggcagtagctatccatttccgactaccagcgaaacgccgcgggttgtttataattcgagaacggataagccgtggccggtggcgctttatttgacgcctgtgagcagtgcgggtggggtggcgattaaagctggctcattaattgccgtgcttattttgcgacagaccaacaactataacagcgatgatttccagtttgtgtggaatatttacgccaataatgatgtggtggtgcctactggcggctgcgatgtttctgctcatgatgtcaccgttactctgccggactaccctggttcagtgccaattcctcttaccgtttattgtgcgaaaagccaaaacctggggtattacctctccggcacaaccgcagatgcgggcaactcgattttcaccaataccgcgtcgttttcaccagcgcagggcgtcggcgtacagttgacgcgcaacggtacgattattccagcgaataacacggtatcgttaggagcagtagggacttcggcggtaagtctgggattaacggcaaattacgcacgtaccggagggcaggtgactgcagggaatgtgcaatcgattattggcgtgacttttgtttatcaataa

SEQ ID NO: 192 - RNA, 903 nt, Escherichia coli
  misc_feature 1..903: note = Escherichia coli F11__WP_000832233.1__Ec(F11)-FimH CDS wt
  source 1..903: mol_type = mRNA
atgaaacgagttattaccctgtttgctgtactgctgatgggctggtcggtaaatgcctggtcattcgcctgtaaaaccgccaatggtaccgctatccctattggcggtggcagcgccaatgtttatgtaaaccttgcgcctgccgtgaatgtggggcaaaacctggtcgtggatctttcgacgcaaatcttttgccataacgattacccggaaaccattacagactatgtcacactgcaacgaggttcggcttatggcggcgtgttatctagtttttccgggatcgtaaaatataatggcagtagctatcctttccctactaccagcgaaacgccgcgggttgtttataattcgagaacggataagccgtggccggtggcgctttatttgacgcctgtgagcagtgcggggggagtggcgattaaagctggctcattaattgccgtgcttattttgcgacagaccaacaactataacagcgatgatttccagtttgtgtggaatatttacgccaataatgatgtggtggtgcccactggcggctgtgatgtttctgctcgtgatgtcaccgttactttgccggactaccctggttcagtgccgattcctcttaccgtttattgtgcgaaaagccaaaacctggggtattacctctccggcacaaccgcagatgcgggcaactcgattttcaccaataccgcgtcgttttcacccgcgcagggcgtcggcgtacagttgacgcgcaacggtacgattattccagcgaataacacggtatcgttaggagcagtagggacttcggcggtaagtctgggattaacggcaaattacgcacgtaccggagggcaggtgactgcagggaatgtgcaatcgattattggcgtgacttttgtttatcaataa

SEQ ID NO: 193 - RNA, 903 nt, synthetic construct
  misc_feature 1..903: note = Escherichia coli J96__ELL41155.1__Ec(J96)-FimH(N28S_N91S_N249Q) CDS wt
  source 1..903: mol_type = other RNA
atgaaacgagttattaccctgtttgctgtactgctgatgggctggtcggtaaatgcctggtcattcgcctgtaaaaccgccagcggtaccgctatccctattggcggtggcagcgccaatgtttatgtaaaccttgcgcccgtcgtgaatgtggggcaaaacctggtcgtggatctttcgacgcaaatcttttgccataacgattatccggaaaccattacagactatgtcacactgcaacgaggctcggcttatggcggcgtgttatctagcttttccgggaccgtaaaatatagtggcagtagctatccatttcctaccaccagcgaaacgccgcgcgttgtttataattcgagaacggataagccgtggccggtggcgctttatttgacgcctgtgagcagtgcgggcggggtggcgattaaagctggctcattaattgccgtgcttattttgcgacagaccaacaactataacagcgatgatttccagtttgtgtggaatatttacgccaataatgatgtggtggtgcctactggcggctgcgatgtttctgctcgtgatgtcaccgttactctgccggactaccctggttcagtgccaattcctcttaccgtttattgtgcgaaaagccaaaacctggggtattacctctccggcacaaccgcagatgcgggcaactcgattttcaccaataccgcgtcgttttcacctgcacagggcgtcggcgtacagttgacgcgccagggtacgattattccagcgaataacacggtatcgttaggagcagtagggacttcggcggtgagtctgggattaacggcaaattatgcacgtaccggagggcaggtgactgcagggaatgtgcaatcgattattggcgtgacttttgtttatcaataa

SEQ ID NO: 194 - RNA, 903 nt, synthetic construct
  misc_feature 1..903: note = Escherichia coli J96__ELL41155.1__Ec(J96)-FimH(N28S_N91S_N249Q_N256D) CDS wt
  source 1..903: mol_type = other RNA
atgaaacgagttattaccctgtttgctgtactgctgatgggctggtcggtaaatgcctggtcattcgcctgtaaaaccgccagcggtaccgctatccctattggcggtggcagcgccaatgtttatgtaaaccttgcgcccgtcgtgaatgtggggcaaaacctggtcgtggatctttcgacgcaaatcttttgccataacgattatccggaaaccattacagactatgtcacactgcaacgaggctcggcttatggcggcgtgttatctagcttttccgggaccgtaaaatatagtggcagtagctatccatttcctaccaccagcgaaacgccgcgcgttgtttataattcgagaacggataagccgtggccggtggcgctttatttgacgcctgtgagcagtgcgggcggggtggcgattaaagctggctcattaattgccgtgcttattttgcgacagaccaacaactataacagcgatgatttccagtttgtgtggaatatttacgccaataatgatgtggtggtgcctactggcggctgcgatgtttctgctcgtgatgtcaccgttactctgccggactaccctggttcagtgccaattcctcttaccgtttattgtgcgaaaagccaaaacctggggtattacctctccggcacaaccgcagatgcgggcaactcgattttcaccaataccgcgtcgttttcacctgcacagggcgtcggcgtacagttgacgcgccagggtacgattattccagcggacaacacggtatcgttaggagcagtagggacttcggcggtgagtctgggattaacggcaaattatgcacgtaccggagggcaggtgactgcagggaatgtgcaatcgattattggcgtgacttttgtttatcaataa

SEQ ID NO: 195 - RNA, 903 nt, synthetic construct
  misc_feature 1..903: note = Escherichia coli J96__ELL41155.1__Ec(J96)-FimH(N28S_V48C_L55C_N91S_N249Q) CDS wt
  source 1..903: mol_type = other RNA
atgaaacgagttattaccctgtttgctgtactgctgatgggctggtcggtaaatgcctggtcattcgcctgtaaaaccgccagcggtaccgctatccctattggcggtggcagcgccaatgtttatgtaaaccttgcgccctgcgtgaatgtggggcaaaactgcgtcgtggatctttcgacgcaaatcttttgccataacgattatccggaaaccattacagactatgtcacactgcaacgaggctcggcttatggcggcgtgttatctagcttttccgggaccgtaaaatatagtggcagtagctatccatttcctaccaccagcgaaacgccgcgcgttgtttataattcgagaacggataagccgtggccggtggcgctttatttgacgcctgtgagcagtgcgggcggggtggcgattaaagctggctcattaattgccgtgcttattttgcgacagaccaacaactataacagcgatgatttccagtttgtgtggaatatttacgccaataatgatgtggtggtgcctactggcggctgcgatgtttctgctcgtgatgtcaccgttactctgccggactaccctggttcagtgccaattcctcttaccgtttattgtgcgaaaagccaaaacctggggtattacctctccggcacaaccgcagatgcgggcaactcgattttcaccaataccgcgtcgttttcacctgcacagggcgtcggcgtacagttgacgcgccagggtacgattattccagcgaataacacggtatcgttaggagcagtagggacttcggcggtgagtctgggattaacggcaaattatgcacgtaccggagggcaggtgactgcagggaatgtgcaatcgattattggcgtgacttttgtttatcaataa

SEQ ID NO: 196 - RNA, 903 nt, synthetic construct
  misc_feature 1..903: note = Escherichia coli J96__ELL41155.1__Ec(J96)-FimH(F165V) CDS wt
  source 1..903: mol_type = other RNA
atgaaacgagttattaccctgtttgctgtactgctgatgggctggtcggtaaatgcctggtcattcgcctgtaaaaccgccaatggtaccgctatccctattggcggtggcagcgccaatgtttatgtaaaccttgcgcccgtcgtgaatgtggggcaaaacctggtcgtggatctttcgacgcaaatcttttgccataacgattatccggaaaccattacagactatgtcacactgcaacgaggctcggcttatggcggcgtgttatctaatttttccgggaccgtaaaatatagtggcagtagctatccatttcctaccaccagcgaaacgccgcgcgttgtttataattcgagaacggataagccgtggccggtggcgctttatttgacgcctgtgagcagtgcgggcggggtggcgattaaagctggctcattaattgccgtgcttattttgcgacagaccaacaactataacagcgatgatttccaggtggtgtggaatatttacgccaataatgatgtggtggtgcctactggcggctgcgatgtttctgctcgtgatgtcaccgttactctgccggactaccctggttcagtgccaattcctcttaccgtttattgtgcgaaaagccaaaacctggggtattacctctccggcacaaccgcagatgcgggcaactcgattttcaccaataccgcgtcgttttcacctgcacagggcgtcggcgtacagttgacgcgcaacggtacgattattccagcgaataacacggtatcgttaggagcagtagggacttcggcggtgagtctgggattaacggcaaattatgcacgtaccggagggcaggtgactgcagggaatgtgcaatcgattattggcgtgacttttgtttatcaataa

SEQ ID NO: 197 - RNA, 903 nt, synthetic construct
  misc_feature 1..903: note = Escherichia coli J96__ELL41155.1__Ec(J96)-FimH CDS opt1
  source 1..903: mol_type = other RNA
atgaagcgcgtgatcaccctgttcgccgtcctcctgatgggctggagcgtgaacgcctggtccttcgcctgcaagaccgccaacggcaccgcgatccccatcgggggcgggagcgccaacgtgtacgtcaacctggccccggtggtgaacgtcggccagaacctcgtggtggacctgtccacgcagatcttctgccacaacgactaccccgagaccatcaccgactacgtcaccctgcagcgcgggagcgcctacggcggcgtgctctccaacttcagcgggacggtgaagtactccggcagctcctaccccttccccaccaccagcgagaccccgcgggtcgtgtacaactcccgcacggacaagccctggcccgtggccctgtacctgacccccgtcagctccgccgggggcgtggcgatcaaggccgggagcctcatcgccgtgctgatcctgcggcagaccaacaactacaactccgacgacttccagttcgtctggaacatctacgcgaacaacgacgtggtggtcccgaccggcggctgcgacgtgagcgcccgcgacgtgacggtcaccctccccgactaccccgggtccgtgcccatcccgctgaccgtgtactgcgccaagagccagaacctgggctactacctctccgggaccacggccgacgccggcaacagcatcttcaccaacaccgcgtccttcagccccgcccagggcgtcggggtgcagctgacccggaacggcacgatcatccccgccaacaacaccgtcagcctgggggccgtgggcacctccgccgtgagcctcgggctgaccgcgaactacgcccgcacgggcggccaggtcaccgccgggaacgtgcagtccatcatcggcgtgaccttcgtctaccagtga

SEQ ID NO: 198 - RNA, 903 nt, synthetic construct
  misc_feature 1..903: note = Escherichia coli 536__ABG72591.1__Ec(536)-FimH CDS opt1
  source 1..903: mol_type = other RNA
atgaagcgcgtgatcaccctgttcgccgtcctcctgatgggctggagcgtgaacgcctggtccttcgcctgcaagaccgccaacggcaccgcgatccccatcgggggcgggagcgccaacgtgtacgtcaacctggccccggccgtgaacgtcggccagaacctcgtggtggacctgtccacgcagatcttctgccacaacgactaccccgagaccatcaccgactacgtcaccctgcagcgcgggagcgcctacggcggcgtgctctccagcttcagcgggacggtgaagtacaacggcagctcctaccccttccccaccaccagcgagaccccgcgggtcgtgtacaactcccgcacggacaagccctggcccgtggccctgtacctgacccccgtcagctccgccgggggcgtggcgatcaaggccgggagcctcatcgccgtgctgatcctgcggcagaccaacaactacaactccgacgacttccagttcgtctggaacatctacgcgaacaacgacgtggtggtcccgaccggcggctgcgacgtgagcgcccgcgacgtgacggtcaccctccccgactaccccgggtccgtgcccatcccgctgaccgtgtactgcgccaagagccagaacctgggctactacctctccgggaccacggccgacgccggcaacagcatcttcaccaacaccgcgtccttcagccccgcccagggcgtcggggtgcagctgacccggaacggcacgatcatccccgccaacaacaccgtcagcctgggggccgtgggcacctccgccgtgagcctcgggctgaccgcgaactacgcccgcacgggcggccaggtcaccgccgggaacgtgcagtccatcatcggcgtgaccttcgtctaccagtga

SEQ ID NO: 199 - RNA, 903 nt, synthetic construct
  misc_feature 1..903: note = Escherichia coli CFT073__AAN83822.1__Ec(CFT073)-FimH CDS opt1
  source 1..903: mol_type = other RNA
atgaagcgcgtgatcaccctgttcgccgtcctcctgatgggctggagcgtgaacgcctggtccttcgcctgcaagaccgccaacggcaccgcgatccccatcgggggcgggagcgccaacgtgtacgtcaacctggccccggccgtgaacgtcggccagaacctcgtggtggacctgtccacgcagatcttctgccacaacgactaccccgagaccatcaccgactacgtcaccctgcagcgcgggagcgcctacggcggcgtgctctccagcttcagcgggacggtgaagtacaacggcagctcctaccccttccccaccaccagcgagaccccgcgggtcgtgtacaactcccgcacggacaagccctggcccgtggccctgtacctgacccccgtcagctccgccgggggcgtggcgatcaaggccgggagcctcatcgccgtgctgatcctgcggcagaccaacaactacaactccgacgacttccagttcgtctggaacatctacgcgaacaacgacgtggtggtcccgaccggcggctgcgacgccagcgcccgcgacgtgacggtcaccctccccgactaccccgggtccgtgcccatcccgctgaccgtgtactgcgccaagagccagaacctgggctactacctctccgggaccacggccgacgccggcaacagcatcttcaccaacaccgcgtccttcagccccgcccagggcgtcggggtgcagctgacccggaacggcacgatcatccccgccaacaacaccgtcagcctgggggccgtgggcacctccgccgtgagcctcgggctgaccgcgaactacgcccgcacgggcggccaggtcaccgccgggaacgtgcagtccatcatcggcgtgaccttcgtctaccagtga

SEQ ID NO: 200 - RNA, 903 nt, synthetic construct
  misc_feature 1..903: note = Escherichia coli IHE3034__AAC35864.1__Ec(IHE3034)-FimH CDS opt1
  source 1..903: mol_type = other RNA
atgaagcgcgtgatcaccctgttcgccgtcctcctgatgggctggagcgtgaacgcctggtccttcgcctgcaagaccgccaacggcaccgcgatccccatcgggggcgggagcgccaacgtgtacgtcaacctggccccggccgtgaacgtcggccagaacctcgtggtggacctgtccacgcagatcttctgccacaacgactaccccgagaccatcaccgactacgtcaccctgcagcgcggggccgcctacggcggcgtgctctccagcttcagcgggacggtgaagtacaacggcagctcctaccccttccccaccaccagcgagaccccgcgggtcgtgtacaactcccgcacggacaagccctggcccgtggccctgtacctgacccccgtcagctccgccgggggcgtggcgatcaaggccgggagcctcatcgccgtgctgatcctgcggcagaccaacaactacaactccgacgacttccagttcgtctggaacatctacgcgaacaacgacgtggtggtcccgaccggcggctgcgacgtgagcgcccgcgacgtgacggtcaccctccccgactaccccgggtccgtgcccatcccgctgaccgtgtactgcgccaagagccagaacctgggctactacctctccgggaccacggccgacgccggcaacagcatcttcaccaacaccgcgtccttcagccccgcccagggcgtcggggtgcagctgacccggaacggcacgatcatccccgccaacaacaccgtcagcctgggggccgtgggcacctccgccgtgagcctcgggctgaccgcgaactacgcccgcacgggcggccaggtcaccgccgggaacgtgcagtccatcatcggcgtgaccttcgtctaccagtga

SEQ ID NO: 201 - RNA, 903 nt, synthetic construct
  misc_feature 1..903: note = Escherichia coli NA114__AEG39414.1__Ec(NA114)-FimH CDS opt1
  source 1..903: mol_type = other RNA
atgaagcgcgtgatcaccctgttcgccgtcctcctgatgggctggagcgtgaacgcctggtccttcgcctgcaagaccgccaacggcaccgcgatccccatcgggggcgggagcgccaacgtgtacgtcaacctggccccggccgtgaacgtcggccagaacctcgtggtggacctgtccacgcagatcttctgccacaacgactaccccgagaccatcaccgactacgtcaccctgcagcgcgggagcgcctacggcggcgtgctctccaacttcagcgggacggtgaagtactccggcagctcctaccccttccccaccaccagcgagaccccgcgggtcgtgtacaactcccgcacggacaagccctggcccgtggccctgtacctgacccccgtcagctccgccgggggcgtggcgatcaaggccgggagcctcatcgccgtgctgatcctgcggcagaccaacaactacaactccgacgacttccagttcgtctggaacatctacgcgaacaacgacgtggtggtcccgaccggcggctgcgacgtgagcgcccacgacgtgacggtcaccctccccgactaccccgggtccgtgcccatcccgctgaccgtgtactgcgccaagagccagaacctgggctactacctctccgggaccacggccgacgccggcaacagcatcttcaccaacaccgcgtccttcagccccgcccagggcgtcggggtgcagctgacccggaacggcacgatcatccccgccaacaacaccgtcagcctgggggccgtgggcacctccgccgtgagcctcgggctgaccgcgaactacgcccgcacgggcggccaggtcaccgccgggaacgtgcagtccatcatcggcgtgaccttcgtctaccagtga

SEQ ID NO: 202 - RNA, 903 nt, synthetic construct
  misc_feature 1..903: note = Escherichia coli F11__WP_000832233.1__Ec(F11)-FimH CDS opt1
  source 1..903: mol_type = other RNA
atgaagcgcgtgatcaccctgttcgccgtcctcctgatgggctggagcgtgaacgcctggtccttcgcctgcaagaccgccaacggcaccgcgatccccatcgggggcgggagcgccaacgtgtacgtcaacctggccccggccgtgaacgtcggccagaacctcgtggtggacctgtccacgcagatcttctgccacaacgactaccccgagaccatcaccgactacgtcaccctgcagcgcgggagcgcctacggcggcgtgctctccagcttcagcgggatcgtgaagtacaacggcagctcctaccccttccccaccaccagcgagaccccgcgggtcgtgtacaactcccgcacggacaagccctggcccgtggccctgtacctgacccccgtcagctccgccgggggcgtggcgatcaaggccgggagcctcatcgccgtgctgatcctgcggcagaccaacaactacaactccgacgacttccagttcgtctggaacatctacgcgaacaacgacgtggtggtcccgaccggcggctgcgacgtgagcgcccgcgacgtgacggtcaccctccccgactaccccgggtccgtgcccatcccgctgaccgtgtactgcgccaagagccagaacctgggctactacctctccgggaccacggccgacgccggcaacagcatcttcaccaacaccgcgtccttcagccccgcccagggcgtcggggtgcagctgacccggaacggcacgatcatccccgccaacaacaccgtcagcctgggggccgtgggcacctccgccgtgagcctcgggctgaccgcgaactacgcccgcacgggcggccaggtcaccgccgggaacgtgcagtccatcatcggcgtgaccttcgtctaccagtga

SEQ ID NO: 203 - RNA, 903 nt, synthetic construct
  misc_feature 1..903: note = Escherichia coli J96__ELL41155.1__Ec(J96)-FimH(N28S_N91S_N249Q) CDS opt1
  source 1..903: mol_type = other RNA
atgaagcgcgtgatcaccctgttcgccgtcctcctgatgggctggagcgtgaacgcctggtccttcgcctgcaagaccgccagcggcaccgcgatccccatcgggggcgggagcgccaacgtgtacgtcaacctggccccggtggtgaacgtcggccagaacctcgtggtggacctgtccacgcagatcttctgccacaacgactaccccgagaccatcaccgactacgtcaccctgcagcgcgggagcgcctacggcggcgtgctctccagcttcagcgggacggtgaagtactccggcagctcctaccccttccccaccaccagcgagaccccgcgggtcgtgtacaactcccgcacggacaagccctggcccgtggccctgtacctgacccccgtcagctccgccgggggcgtggcgatcaaggccgggagcctcatcgccgtgctgatcctgcggcagaccaacaactacaactccgacgacttccagttcgtctggaacatctacgcgaacaacgacgtggtggtcccgaccggcggctgcgacgtgagcgcccgcgacgtgacggtcaccctccccgactaccccgggtccgtgcccatcccgctgaccgtgtactgcgccaagagccagaacctgggctactacctctccgggaccacggccgacgccggcaacagcatcttcaccaacaccgcgtccttcagccccgcccagggcgtcggggtgcagctgacccggcagggcacgatcatccccgccaacaacaccgtcagcctgggggccgtgggcacctccgccgtgagcctcgggctgaccgcgaactacgcccgcacgggcggccaggtcaccgccgggaacgtgcagtccatcatcggcgtgaccttcgtctaccagtga

SEQ ID NO: 204 - RNA, 903 nt, synthetic construct
  misc_feature 1..903: note = Escherichia coli J96__ELL41155.1__Ec(J96)-FimH(N28S_N91S_N249Q_N256D) CDS opt1
  source 1..903: mol_type = other RNA
atgaagcgcgtgatcaccctgttcgccgtcctcctgatgggctggagcgtgaacgcctggtccttcgcctgcaagaccgccagcggcaccgcgatccccatcgggggcgggagcgccaacgtgtacgtcaacctggccccggtggtgaacgtcggccagaacctcgtggtggacctgtccacgcagatcttctgccacaacgactaccccgagaccatcaccgactacgtcaccctgcagcgcgggagcgcctacggcggcgtgctctccagcttcagcgggacggtgaagtactccggcagctcctaccccttccccaccaccagcgagaccccgcgggtcgtgtacaactcccgcacggacaagccctggcccgtggccctgtacctgacccccgtcagctccgccgggggcgtggcgatcaaggccgggagcctcatcgccgtgctgatcctgcggcagaccaacaactacaactccgacgacttccagttcgtctggaacatctacgcgaacaacgacgtggtggtcccgaccggcggctgcgacgtgagcgcccgcgacgtgacggtcaccctccccgactaccccgggtccgtgcccatcccgctgaccgtgtactgcgccaagagccagaacctgggctactacctctccgggaccacggccgacgccggcaacagcatcttcaccaacaccgcgtccttcagccccgcccagggcgtcggggtgcagctgacccggcagggcacgatcatccccgccgacaacaccgtcagcctgggggccgtgggcacctccgccgtgagcctcgggctgaccgcgaactacgcccgcacgggcggccaggtcaccgccgggaacgtgcagtccatcatcggcgtgaccttcgtctaccagtga

SEQ ID NO: 205 - RNA, 903 nt, synthetic construct
  misc_feature 1..903: note = Escherichia coli J96__ELL41155.1__Ec(J96)-FimH(N28S_V48C_L55C_N91S_N249Q) CDS opt1
  source 1..903: mol_type = other RNA
atgaagcgcgtgatcaccctgttcgccgtcctcctgatgggctggagcgtgaacgcctggtccttcgcctgcaagaccgccagcggcaccgcgatccccatcgggggcgggagcgccaacgtgtacgtcaacctggccccgtgcgtgaacgtcggccagaactgcgtggtggacctgtccacgcagatcttctgccacaacgactaccccgagaccatcaccgactacgtcaccctgcagcgcgggagcgcctacggcggcgtgctctccagcttcagcgggacggtgaagtactccggcagctcctaccccttccccaccaccagcgagaccccgcgggtcgtgtacaactcccgcacggacaagccctggcccgtggccctgtacctgacccccgtcagctccgccgggggcgtggcgatcaaggccgggagcctcatcgccgtgctgatcctgcggcagaccaacaactacaactccgacgacttccagttcgtctggaacatctacgcgaacaacgacgtggtggtcccgaccggcggctgcgacgtgagcgcccgcgacgtgacggtcaccctccccgactaccccgggtccgtgcccatcccgctgaccgtgtactgcgccaagagccagaacctgggctactacctctccgggaccacggccgacgccggcaacagcatcttcaccaacaccgcgtccttcagccccgcccagggcgtcggggtgcagctgacccggcagggcacgatcatccccgccaacaacaccgtcagcctgggggccgtgggcacctccgccgtgagcctcgggctgaccgcgaactacgcccgcacgggcggccaggtcaccgccgggaacgtgcagtccatcatcggcgtgaccttcgtctaccagtga

SEQ ID NO: 206 - RNA, 903 nt, synthetic construct
  misc_feature 1..903: note = Escherichia coli J96__ELL41155.1__Ec(J96)-FimH(F165V) CDS opt1
  source 1..903: mol_type = other RNA
atgaagcgcgtgatcaccctgttcgccgtcctcctgatgggctggagcgtgaacgcctggtccttcgcctgcaagaccgccaacggcaccgcgatccccatcgggggcgggagcgccaacgtgtacgtcaacctggccccggtggtgaacgtcggccagaacctcgtggtggacctgtccacgcagatcttctgccacaacgactaccccgagaccatcaccgactacgtcaccctgcagcgcgggagcgcctacggcggcgtgctctccaacttcagcgggacggtgaagtactccggcagctcctaccccttccccaccaccagcgagaccccgcgggtcgtgtacaactcccgcacggacaagccctggcccgtggccctgtacctgacccccgtcagctccgccgggggcgtggcgatcaaggccgggagcctcatcgccgtgctgatcctgcggcagaccaacaactacaactccgacgacttccaggtggtctggaacatctacgcgaacaacgacgtggtggtcccgaccggcggctgcgacgtgagcgcccgcgacgtgacggtcaccctccccgactaccccgggtccgtgcccatcccgctgaccgtgtactgcgccaagagccagaacctgggctactacctctccgggaccacggccgacgccggcaacagcatcttcaccaacaccgcgtccttcagccccgcccagggcgtcggggtgcagctgacccggaacggcacgatcatccccgccaacaacaccgtcagcctgggggccgtgggcacctccgccgtgagcctcgggctgaccgcgaactacgcccgcacgggcggccaggtcaccgccgggaacgtgcagtccatcatcggcgtgaccttcgtctaccagtga

SEQ ID NO: 207 - RNA, 903 nt, synthetic construct
  misc_feature 1..903: note = Escherichia coli J96__ELL41155.1__Ec(J96)-FimH CDS opt1
  source 1..903: mol_type = other RNA
atgaagcgcgtgatcaccctgttcgccgtcctcctgatgggctggagcgtgaacgcctggtccttcgcgtgcaagaccgccaacgggacggccatccccatcggcgggggcagcgccaacgtgtacgtcaacctggccccggtggtgaacgtcgggcagaacctcgtggtggacctgtccacccagatcttctgccacaacgactaccccgagaccatcaccgactacgtcacgctgcagcggggcagcgcgtacggcggggtgctctccaacttcagcggcaccgtgaagtactccgggagctcctaccccttccccaccaccagcgagacgccgcgcgtcgtgtacaactcccggaccgacaagccctggcccgtggccctgtacctgacccccgtcagctccgccggcggggtggccatcaaggcgggcagcctcatcgccgtgctgatcctgcgccagaccaacaactacaactccgacgacttccagttcgtctggaacatctacgccaacaacgacgtggtggtcccgacgggcgggtgcgacgtgagcgcccgggacgtgaccgtcaccctccccgactaccccggctccgtgcccatcccgctgaccgtctactgcgccaagagccagaacctggggtactacctctccggcacgaccgcggacgccggcaacagcatcttcaccaacaccgccagcttctcccccgcccagggggtgggcgtgcagctgacgcgcaacgggaccatcatccccgccaacaacaccgtcagcctgggcgcggtggggacctccgccgtgagcctcggcctgacggccaactacgcccggaccggcgggcaggtcaccgccggcaacgtgcagtccatcatcggggtgaccttcgtctaccagtga

SEQ ID NO: 208 - RNA, 903 nt, synthetic construct
  misc_feature 1..903: note = Escherichia coli 536__ABG72591.1__Ec(536)-FimH CDS opt1
  source 1..903: mol_type = other RNA
atgaagcgcgtgatcaccctgttcgccgtcctcctgatgggctggagcgtgaacgcctggtccttcgcgtgcaagaccgccaacgggacggccatccccatcggcgggggcagcgccaacgtgtacgtcaacctggccccggcggtgaacgtggggcagaacctcgtcgtggacctgtccacccagatcttctgccacaacgactaccccgagaccatcaccgactacgtgacgctgcagcggggcagcgcctacggcggggtcctctccagcttctccggcaccgtgaagtacaacgggagctcctaccccttccccaccaccagcgagacgccgcgcgtggtctacaactcccggaccgacaagccctggcccgtggccctgtacctgacccccgtgagctccgccggcggggtcgcgatcaaggccggcagcctcatcgccgtgctgatcctgcgccagaccaacaactacaactccgacgacttccagttcgtgtggaacatctacgccaacaacgacgtcgtggtgccgacgggcgggtgcgacgtcagcgcccgggacgtgaccgtgaccctccccgactaccccggctccgtccccatcccgctgaccgtgtactgcgccaagagccagaacctggggtactacctctccggcacgaccgcggacgccggcaacagcatcttcaccaacaccgccagcttctcccccgcccagggggtcggcgtgcagctgacgcgcaacgggaccatcatccccgcgaacaacaccgtgagcctgggcgccgtcgggacctccgccgtgagcctcggcctgacggccaactacgcccggaccggcggccaggtgaccgcggggaacgtccagtccatcatcggggtgaccttcgtgtaccagtga

SEQ ID NO: 209 - RNA, 903 nt, synthetic construct
  misc_feature 1..903: note = Escherichia coli CFT073__AAN83822.1__Ec(CFT073)-FimH CDS opt1
  source 1..903: mol_type = other RNA
atgaagcgcgtgatcaccctgttcgccgtcctcctgatgggctggagcgtgaacgcctggtccttcgcgtgcaagaccgccaacgggacggccatccccatcggcgggggcagcgccaacgtgtacgtcaacctggccccggcggtgaacgtggggcagaacctcgtcgtggacctgtccacccagatcttctgccacaacgactaccccgagaccatcaccgactacgtgacgctgcagcggggcagcgcctacggcggggtcctctccagcttctccggcaccgtgaagtacaacgggagctcctaccccttccccaccaccagcgagacgccgcgcgtggtctacaactcccggaccgacaagccctggcccgtggccctgtacctgacccccgtgagctccgccggcggggtcgcgatcaaggccggcagcctcatcgccgtgctgatcctgcgccagaccaacaactacaactccgacgacttccagttcgtgtggaacatctacgccaacaacgacgtcgtggtgccgacgggcgggtgcgacgccagcgcgcgggacgtcaccgtgaccctccccgactaccccggctccgtgcccatcccgctgaccgtctactgcgccaagagccagaacctggggtactacctctccggcacgaccgccgacgccggcaacagcatcttcaccaacaccgccagcttctcccccgcgcagggggtgggcgtccagctgacgcgcaacgggaccatcatccccgccaacaacaccgtgagcctgggcgccgtggggacctccgccgtcagcctcggcctgacggccaactacgcgcggaccggcggccaggtgaccgccgggaacgtgcagtccatcatcggggtcaccttcgtgtaccagtga

SEQ ID NO: 210 - RNA, 903 nt, synthetic construct
  misc_feature 1..903: note = Escherichia coli IHE3034__AAC35864.1__Ec(IHE3034)-FimH CDS opt1
  source 1..903: mol_type = other RNA
atgaagcgcgtgatcaccctgttcgccgtcctcctgatgggctggagcgtgaacgcctggtccttcgcgtgcaagaccgccaacgggacggccatccccatcggcgggggcagcgccaacgtgtacgtcaacctggccccggcggtgaacgtggggcagaacctcgtcgtggacctgtccacccagatcttctgccacaacgactaccccgagaccatcaccgactacgtgacgctgcagcggggcgccgcctacggcggggtcctcagctccttcagcggcaccgtgaagtacaacgggtccagctaccccttccccaccacctccgagacgccgcgcgtggtctacaacagccggaccgacaagccctggcccgtggccctgtacctgacccccgtgtccagcgcgggcggggtcgccatcaaggccggctccctcatcgccgtgctgatcctgcgccagaccaacaactacaacagcgacgacttccagttcgtgtggaacatctacgccaacaacgacgtcgtggtgccgacgggcgggtgcgacgtctccgcgcgggacgtgaccgtgaccctccccgactaccccggcagcgtccccatcccgctgaccgtgtactgcgccaagtcccagaacctggggtactacctcagcggcacgaccgccgacgccggcaactccatcttcaccaacaccgccagcttcagccccgcgcagggggtcggcgtgcagctgacgcgcaacgggaccatcatccccgccaacaacaccgtgtccctgggcgccgtcgggaccagcgccgtgtccctcggcctgacggccaactacgcgcggaccggcggccaggtgaccgccgggaacgtccagagcatcatcggggtgaccttcgtgtaccagtga

SEQ ID NO: 211 - RNA, 903 nt, synthetic construct
  misc_feature 1..903: note = Escherichia coli NA114__AEG39414.1__Ec(NA114)-FimH CDS opt1
  source 1..903: mol_type = other RNA
atgaagcgcgtgatcaccctgttcgccgtcctcctgatgggctggagcgtgaacgcctggtccttcgcgtgcaagaccgccaacgggacggccatccccatcggcgggggcagcgccaacgtgtacgtcaacctggccccggcggtgaacgtggggcagaacctcgtcgtggacctgtccacccagatcttctgccacaacgactaccccgagaccatcaccgactacgtgacgctgcagcggggcagcgcctacggcggggtcctctccaacttcagcggcaccgtgaagtactccgggagctcctaccccttccccaccaccagcgagacgccgcgcgtggtctacaactcccggaccgacaagccctggcccgtggccctgtacctgacccccgtgagctccgccggcggggtcgcgatcaaggccggcagcctcatcgccgtgctgatcctgcgccagaccaacaactacaactccgacgacttccagttcgtgtggaacatctacgccaacaacgacgtcgtggtgccgacgggcgggtgcgacgtcagcgcccacgacgtgaccgtgaccctccccgactaccccggctccgtccccatcccgctgaccgtgtactgcgccaagagccagaacctggggtactacctctccggcacgaccgcggacgccggcaacagcatcttcaccaacaccgccagcttctcccccgcccagggggtcggcgtgcagctgacgcggaacgggaccatcatccccgcgaacaacaccgtgagcctgggcgccgtcgggacctccgccgtgagcctcggcctgacggccaactacgcccgcaccggcggccaggtgaccgcggggaacgtccagtccatcatcggggtgaccttcgtgtaccagtga

SEQ ID NO: 212 - RNA, 903 nt, synthetic construct
  misc_feature 1..903: note = Escherichia coli F11__WP_000832233.1__Ec(F11)-FimH CDS opt1
  source 1..903: mol_type = other RNA
atgaagcgcgtgatcaccctgttcgccgtcctcctgatgggctggagcgtgaacgcctggtccttcgcgtgcaagaccgccaacgggacggccatccccatcggcgggggcagcgccaacgtgtacgtcaacctggccccggcggtgaacgtggggcagaacctcgtcgtggacctgtccacccagatcttctgccacaacgactaccccgagaccatcaccgactacgtgacgctgcagcggggcagcgcctacggcggggtcctctccagcttctccggcatcgtgaagtacaacgggagctcctaccccttccccaccaccagcgagaccccgcgcgtggtctacaactcccggacggacaagccctggcccgtggccctgtacctgacccccgtgagctccgccggcggggtcgcgatcaaggccggcagcctcatcgccgtgctgatcctgcgccagaccaacaactacaactccgacgacttccagttcgtgtggaacatctacgccaacaacgacgtcgtggtgccgaccggcgggtgcgacgtcagcgcccgggacgtgacggtgaccctccccgactaccccggctccgtccccatcccgctgaccgtgtactgcgccaagagccagaacctggggtactacctctccggcaccacggcggacgccggcaacagcatcttcaccaacaccgccagcttctcccccgcccagggggtcggcgtgcagctgacccgcaacgggacgatcatccccgcgaacaacaccgtgagcctgggcgccgtcgggacctccgccgtgagcctcggcctgaccgccaactacgcccggacgggcggccaggtgaccgcggggaacgtccagtccatcatcggggtgaccttcgtgtaccagtga

SEQ ID NO: 213 - RNA, 903 nt, synthetic construct
  misc_feature 1..903: note = Escherichia coli J96__ELL41155.1__Ec(J96)-FimH(N28S_N91S_N249Q) CDS opt1
  source 1..903: mol_type = other RNA
atgaagcgcgtgatcaccctgttcgccgtcctcctgatgggctggagcgtgaacgcctggtccttcgcgtgcaagaccgccagcgggacggccatccccatcggcgggggctccgccaacgtgtacgtcaacctggccccggtggtgaacgtcgggcagaacctcgtggtggacctgagcacccagatcttctgccacaacgactaccccgagaccatcaccgactacgtcacgctgcagcggggctccgcgtacggcggggtgctcagctccttcagcggcaccgtgaagtactccgggagctcctaccccttccccaccaccagcgagacgccgcgcgtcgtgtacaactcccggaccgacaagccctggcccgtggccctgtacctgacccccgtcagctccgccggcggggtggccatcaaggcgggcagcctcatcgccgtgctgatcctgcgccagaccaacaactacaactccgacgacttccagttcgtctggaacatctacgccaacaacgacgtggtggtcccgacgggcgggtgcgacgtgagcgcccgggacgtgaccgtcaccctccccgactaccccggctccgtgcccatcccgctgaccgtctactgcgccaagagccagaacctggggtactacctcagcggcacgaccgcggacgccggcaactccatcttcaccaacaccgccagcttctcccccgcccagggggtgggcgtgcagctgacgcgccaggggaccatcatccccgccaacaacaccgtcagcctgggcgcggtggggacctccgccgtgagcctcggcctgacggccaactacgcccggaccggcgggcaggtcaccgccggcaacgtgcagtccatcatcggggtgaccttcgtctaccagtga

SEQ ID NO: 214 - RNA, 903 nt, synthetic construct
  misc_feature 1..903: note = Escherichia coli J96__ELL41155.1__Ec(J96)-FimH(N28S_N91S_N249Q_N256D) CDS opt1
  source 1..903: mol_type = other RNA
atgaagcgcgtgatcaccctgttcgccgtcctcctgatgggctggagcgtgaacgcctggtccttcgcgtgcaagaccgccagcgggacggccatccccatcggcgggggctccgccaacgtgtacgtcaacctggccccggtggtgaacgtcgggcagaacctcgtggtggacctgagcacccagatcttctgccacaacgactaccccgagaccatcaccgactacgtcacgctgcagcggggctccgcgtacggcggggtgctcagctccttcagcggcaccgtgaagtactccgggagctcctaccccttccccaccaccagcgagacgccgcgcgtcgtgtacaactcccggaccgacaagccctggcccgtggccctgtacctgacccccgtcagctccgccggcggggtggccatcaaggcgggcagcctcatcgccgtgctgatcctgcgccagaccaacaactacaactccgacgacttccagttcgtctggaacatctacgccaacaacgacgtggtggtcccgacgggcgggtgcgacgtgagcgcccgggacgtgaccgtcaccctccccgactaccccggctccgtgcccatcccgctgaccgtctactgcgccaagagccagaacctggggtactacctcagcggcacgaccgcggacgccggcaactccatcttcaccaacaccgccagcttctcccccgcccagggggtgggcgtgcagctgacgcgccaggggaccatcatccccgccgacaacaccgtcagcctgggcgcggtggggacctccgccgtgagcctcggcctgacggccaactacgcccggaccggcgggcaggtcaccgccggcaacgtgcagtccatcatcggggtgaccttcgtctaccagtga

SEQ ID NO: 215 - RNA, 903 nt, synthetic construct
  misc_feature 1..903: note = Escherichia coli J96__ELL41155.1__Ec(J96)-FimH(N28S_V48C_L55C_N91S_N249Q) CDS opt1
  source 1..903: mol_type = other RNA
atgaagcgcgtgatcaccctgttcgccgtcctcctgatgggctggagcgtgaacgcctggtccttcgcgtgcaagaccgccagcgggacggccatccccatcggcgggggctccgccaacgtgtacgtcaacctggccccgtgcgtgaacgtggggcagaactgcgtcgtggacctcagcacccagatcttctgccacaacgactaccccgagaccatcaccgactacgtgacgctgcagcggggctccgcgtacggcggggtcctgagctccttcagcggcaccgtgaagtactccgggagctcctaccccttccccaccaccagcgagacgccgcgcgtggtctacaactcccggaccgacaagccctggcccgtggccctctacctgacccccgtgagctccgccggcggggtcgccatcaaggcgggcagcctgatcgccgtgctcatcctgcgccagaccaacaactacaactccgacgacttccagttcgtgtggaacatctacgccaacaacgacgtcgtggtgccgacgggcgggtgcgacgtcagcgcccgggacgtgaccgtgaccctgcccgactaccccggctccgtccccatcccgctcaccgtgtactgcgccaagagccagaacctggggtactacctgagcggcacgaccgcggacgccggcaactccatcttcaccaacaccgccagcttctcccccgcccagggggtcggcgtgcagctcacgcgccaggggaccatcatccccgccaacaacaccgtgagcctgggcgcggtcgggacctccgccgtgagcctgggcctcacggccaactacgcccggaccggcggccaggtgaccgccgggaacgtccagtccatcatcggggtgaccttcgtgtaccagtga

SEQ ID NO: 216 - RNA, 903 nt, synthetic construct
  misc_feature 1..903: note = Escherichia coli J96__ELL41155.1__Ec(J96)-FimH(F165V) CDS opt1
  source 1..903: mol_type = other RNA
atgaagcgcgtgatcaccctgttcgccgtcctcctgatgggctggagcgtgaacgcctggtccttcgcgtgcaagaccgccaacgggacggccatccccatcggcgggggcagcgccaacgtgtacgtcaacctggccccggtggtgaacgtcgggcagaacctcgtggtggacctgtccacccagatcttctgccacaacgactaccccgagaccatcaccgactacgtcacgctgcagcggggcagcgcgtacggcggggtgctctccaacttcagcggcaccgtgaagtactccgggagctcctaccccttccccaccaccagcgagacgccgcgcgtcgtgtacaactcccggaccgacaagccctggcccgtggccctgtacctgacccccgtcagctccgccggcggggtggccatcaaggcgggcagcctcatcgccgtgctgatcctgcgccagaccaacaactacaactccgacgacttccaggtcgtgtggaacatctacgccaacaacgacgtggtcgtgccgacgggcgggtgcgacgtgagcgcccgggacgtcaccgtgaccctccccgactaccccggctccgtccccatcccgctgaccgtgtactgcgccaagagccagaacctggggtactacctctccggcacgaccgcggacgccggcaacagcatcttcaccaacaccgccagcttctcccccgcccagggggtgggcgtccagctgacgcgcaacgggaccatcatccccgccaacaacaccgtgagcctgggcgcggtggggacctccgccgtcagcctcggcctgacggccaactacgcccggaccggcggccaggtgaccgccgggaacgtgcagtccatcatcggggtcaccttcgtgtaccagtga

SEQ ID NO: 217 - RNA, 903 nt, synthetic construct
  misc_feature 1..903: note = Escherichia coli J96__ELL41155.1__Ec(J96)-FimH CDS opt3
  source 1..903: mol_type = other RNA
atgaagagagtgatcaccctgttcgccgtcctccttatgggctggagcgttaacgcttggtcctttgcatgcaaaacagccaatgggactgcgattcccataggaggtggctctgctaacgtgtacgtaaatctggcccctgtggtcaacgtggggcagaatttggttgtggacttatcaacgcaaatcttctgtcacaacgattatccagagaccattacagactacgtcactctgcagaggggaagtgcatatggcggtgtgctaagcaatttttccgggaccgtaaagtactctggatcgtcatatccgttccccacaaccagcgaaactcctcgggttgtgtacaacagtcgcacagataaaccatggcccgtcgccctctatctgacccctgtgtcctctgctggcggcgtggcaatcaaggccgggagccttattgctgtcctgatcttgcgacagacgaataactacaattccgacgattttcagttcgtttggaacatatacgccaataacgacgtggtagtgccaactggaggttgcgatgtctcagcgcgtgacgtgaccgttacactccccgattatcctggcagtgtgccaatcccgctgactgtctactgtgcaaaaagccaaaatctggggtattacctctctggaaccacagccgacgctggcaactccatttttaccaacacggcctcattcagccccgcacagggtgtgggggtacagttaactagaaatggaacaatcattcctgctaacaataccgttagtctgggcgccgtgggcacttctgcggtctcccttgggttgacagccaactatgcaaggaccggaggtcaggtgacggctggcaatgtccaaagcatcataggggtgacctttgtttaccagtga

SEQ ID NO: 218 - RNA, 903 nt, synthetic construct
  misc_feature 1..903: note = Escherichia coli 536__ABG72591.1__Ec(536)-FimH CDS opt3
  source 1..903: mol_type = other RNA
atgaagagagtgatcaccctgttcgccgtcctccttatgggctggagcgttaacgcttggtcctttgcatgcaaaacagccaatgggactgcgattcccataggaggtggctctgctaacgtgtacgtaaatctggcccctgcagtgaacgtcgggcagaatttggtggttgacttatcaacgcaaatcttctgtcacaacgattatccagagaccattacagactacgtgactctgcagaggggaagtgcctatggcggtgtcctaagctccttttctgggaccgtgaagtacaatggatcgtcatatccgttccccacaaccagcgaaactcctcgggtagtttacaacagtcgcacagataaaccatggcccgtggctctctatctgacccctgtctcctctgcaggcggcgtggccatcaaggctgggagccttattgccgtgctgatcttgcgacagacgaataactacaattccgacgattttcagttcgtctggaacatatacgcgaataacgacgttgtggtaccaactggaggttgcgatgtgtcagcacgtgacgtcaccgtgacactccccgattatcctggcagtgttccaatcccgctgactgtgtactgtgccaaaagccaaaatctggggtattacctctctggaaccacagctgacgccggcaactccatttttaccaacacggcatcattcagccccgctcagggtgtcggggtgcagttaactagaaatggaacaatcattcctgccaacaataccgtaagtctgggcgcggttggcacttctgccgtgtcccttgggttgacagcaaactatgctaggaccggaggtcaggtcacggccggcaatgtgcaaagcatcataggggtcacctttgtgtaccagtga

SEQ ID NO: 219 - RNA, 903 nt, synthetic construct
  misc_feature 1..903: note = Escherichia coli CFT073__AAN83822.1__Ec(CFT073)-FimH CDS opt3
  source 1..903: mol_type = other RNA
atgaagagagtgatcaccctgttcgccgtcctccttatgggctggagcgttaacgcttggtcctttgcatgcaaaacagccaatgggactgcgattcccataggaggtggctctgctaacgtgtacgtaaatctggcccctgcagtgaacgtcgggcagaatttggtggttgacttatcaacgcaaatcttctgtcacaacgattatccagagaccattacagactacgtgactctgcagaggggaagtgcctatggcggtgtcctaagctccttttctgggaccgtgaagtacaatggatcgtcatatccgttccccacaaccagcgaaactcctcgggtagtttacaacagtcgcacagataaaccatggcccgtggctctctatctgacccctgtctcctctgcaggcggcgtggccatcaaggctgggagccttattgccgtgctgatcttgcgacagacgaataactacaattccgacgattttcagttcgtctggaacatatacgcgaataacgacgttgtggtaccaactggaggttgcgatgcatcagcccgtgacgtgaccgtcacactccccgattatcctggcagtgtgccaatcccgctgactgtttactgtgctaaaagccaaaatctggggtattacctctctggaaccacagccgacgcaggcaactccatttttaccaacacggcttcattcagccccgcccagggtgtgggggtccagttaactagaaatggaacaatcattcctgcgaacaataccgtgagtctgggcgccgtaggcacttctgcagtttcccttgggttgacagctaactatgccaggaccggaggtcaggtgacggctggcaatgtccaaagcatcataggggtgacctttgtctaccagtga

SEQ ID NO: 220 - RNA, 903 nt, synthetic construct
  misc_feature 1..903: note = Escherichia coli IHE3034__AAC35864.1__Ec(IHE3034)-FimH CDS opt3
  source 1..903: mol_type = other RNA
atgaagagagtgatcaccctgttcgccgtcctccttatgggctggagcgttaacgcttggtcctttgcatgcaaaacagccaatgggactgcgattcccataggaggtggctctgctaacgtgtacgtaaatctggcccctgcagtgaacgtcgggcagaatttggtggttgacttatcaacgcaaatcttctgtcacaacgattatccagagaccattacagactacgtgactctgcagaggggagccgcttatggcggtgtcctaagtagcttttccgggaccgtgaagtacaatggatcttcgtatccgttccccacaacctcagaaactcctcgggtagtttacaacagccgcacagataaaccatggcccgtggcactctatctgacccctgtcagttccgccggcggcgtggctatcaaggccgggtctcttattgcggtgctgatcttgcgacagacgaataactacaatagcgacgattttcagttcgtctggaacatatacgcaaataacgacgttgtggtaccaactggaggttgcgatgtgtccgcccgtgacgtcaccgtgacactccccgattatcctggctcagttccaatcccgctgactgtgtactgtgctaaaagtcaaaatctggggtattacctcagcggaaccacagccgacgcaggcaactctatttttaccaacacggcttccttctcacccgcccagggtgtcggggtgcagttaactagaaatggaacaatcattcctgcgaacaataccgtaagcctgggcgccgttggcacaagtgcagtgtctcttgggttgactgctaactatgccaggaccggaggtcaggtcacggctggcaatgtgcaatccatcataggggtcacctttgtgtaccagtga

SEQ ID NO: 221 - RNA, 903 nt, synthetic construct
  misc_feature 1..903: note = Escherichia coli NA114__AEG39414.1__Ec(NA114)-FimH CDS opt3
  source 1..903: mol_type = other RNA
atgaagagagtgatcaccctgttcgccgtcctccttatgggctggagcgttaacgcttggtcctttgcatgcaaaacagccaatgggactgcgattcccataggaggtggctctgctaacgtgtacgtaaatctggcccctgcagtgaacgtcgggcagaatttggtggttgacttatcaacgcaaatcttctgtcacaacgattatccagagaccattacagactacgtgactctgcagaggggaagtgcctatggcggtgtcctaagcaatttttccgggaccgtgaagtactctggatcgtcatatccgttccccacaaccagcgaaactcctcgggtagtttacaacagtcgcacagataaaccatggcccgtggctctctatctgacccctgtctcctctgcaggcggcgtggccatcaaggctgggagccttattgccgtgctgatcttgcgacagacgaataactacaattccgacgattttcagttcgtctggaacatatacgcgaataacgacgttgtggtaccaactggaggttgcgatgtgtcagcacatgacgtcaccgtgacactccccgattatcctggcagtgttccaatcccgctgactgtgtactgtgccaaaagccaaaatctggggtattacctctctggaaccacagctgacgccggcaactccatttttaccaacacggcatcattcagccccgctcagggtgtcggggtgcagttaactcgtaatggaacaatcattcctgccaacaataccgtaagtctgggcgcggttggcacttctgccgtgtcccttgggttgacagcaaactatgctagaaccggaggtcaggtcacggccggcaatgtgcaaagcatcataggggtcacctttgtgtaccagtga

SEQ ID NO: 222 - RNA, 903 nt, synthetic construct
  misc_feature 1..903: note = Escherichia coli F11__WP_000832233.1__Ec(F11)-FimH CDS opt3
  source 1..903: mol_type = other RNA
atgaagagagtgatcaccctgttcgccgtcctccttatgggctggagcgttaacgcttggtcctttgcatgcaaaacagccaatgggactgcgattcccataggaggtggctctgctaacgtgtacgtaaatctggcccctgcagtgaacgtcgggcagaatttggtggttgacttatcaacgcaaatcttctgtcacaacgattatccagagaccattacagactacgtgactctgcagaggggaagtgcctatggcggtgtcctaagctccttttctgggatcgtgaagtacaatggatcgtcatatccgttccccaccacaagcgaaacccctcgggtagtttacaacagtcgcactgataaaccatggcccgtggctctctatctgacacctgtctcctctgcaggcggcgtggccattaaggctgggagccttatcgccgtgctgatattgcgacagaccaataactacaattccgacgattttcagttcgtctggaacatctacgcgaataacgacgttgtggtaccaacgggaggttgcgatgtgtcagcacgtgacgtcactgtgaccctccccgattatcctggcagtgttccaattccgctgacagtgtactgtgccaaaagccaaaatctggggtattacctctctggaactaccgctgacgccggcaactccatctttacaaacaccgcatcattcagccccgctcagggtgtcggggtgcagttaacgagaaatggaactattatccctgccaacaatacagtaagtctgggcgcggttggcacctctgccgtgtcccttgggttgactgcaaactatgctaggacaggaggtcaggtcaccgccggcaatgtgcaaagcataattggggtcacgtttgtgtaccagtga

SEQ ID NO: 223 - RNA, 903 nt, synthetic construct
  misc_feature 1..903: note = Escherichia coli J96__ELL41155.1__Ec(J96)-FimH(N28S_N91S_N249Q) CDS opt3
  source 1..903: mol_type = other RNA
atgaagagagtgatcaccctgttcgccgtcctccttatgggctggagcgttaacgcttggtcctttgcatgcaaaacagcctctgggactgcgattcccataggaggtggctcagctaatgtgtacgtaaacctggcccctgtggtcaatgtggggcagaacttggttgtggacttaagtacgcaaatcttctgtcacaatgattatccagagaccattacagactacgtcactctgcagaggggaagcgcatatggcggtgtgctatcctctttttcggggaccgtaaagtactcaggaagcagttatccgttccccacaacctccgaaactcctcgggttgtgtacaactctcgcacagataaaccatggcccgtcgccctctatctgacccctgtgagctccgctggcggcgtggcaatcaaggccgggtcacttattgctgtcctgatcttgcgacagacgaataactacaatagtgacgattttcagttcgtttggaacatatacgccaataacgacgtggtagtgccaactggaggttgcgatgtcagcgcgcgtgacgtgaccgttacactccccgattatcctggctctgtgccaatcccgctgactgtctactgtgcaaaatcccaaaatctggggtattacctctcaggaaccacagccgacgctggcaacagcatttttaccaatacggccagtttctctcccgcacagggtgtgggggtacagttaactagacagggaacaatcattcctgctaacaacaccgtttccctgggcgccgtgggcactagcgcggtctcgcttgggttgacagccaattatgcaaggaccggaggtcaagtgacggctggcaacgtccagtctatcataggggtgacctttgtttaccagtga

SEQ ID NO: 224 - RNA, 903 nt, synthetic construct
  misc_feature 1..903: note = Escherichia coli J96__ELL41155.1__Ec(J96)-FimH(N28S_N91S_N249Q_N256D) CDS opt3
  source 1..903: mol_type = other RNA
atgaagagagtgatcaccctgttcgccgtcctccttatgggctggagcgttaacgcttggtcctttgcatgcaaaacagcctctgggactgcgattcccataggaggtggctcagctaatgtgtacgtaaacctggcccctgtggtcaatgtggggcagaacttggttgtggacttaagtacgcaaatcttctgtcacaatgattatccagagaccattacagactacgtcactctgcagaggggaagcgcatatggcggtgtgctatcctctttttcggggaccgtaaagtactcaggaagcagttatccgttccccacaacctccgaaactcctcgggttgtgtacaactctcgcacagataaaccatggcccgtcgccctctatctgacccctgtgagctccgctggcggcgtggcaatcaaggccgggtcacttattgctgtcctgatcttgcgacagacgaataactacaatagtgacgattttcagttcgtttggaacatatacgccaataacgacgtggtagtgccaactggaggttgcgatgtcagcgcgcgtgacgtgaccgttacactccccgattatcctggctctgtgccaatcccgctgactgtctactgtgcaaaatcccaaaatctggggtattacctctcaggaaccacagccgacgctggcaacagcatttttaccaatacggccagtttctctcccgcacagggtgtgggggtacagttaactagacagggaacaatcattcctgctgataacaccgtttccctgggcgccgtgggcactagcgcggtctcgcttgggttgacagccaactatgcaaggaccggaggtcaagtgacggctggcaatgtccagtctatcataggggtgacctttgtttaccagtga

SEQ ID NO: 225 - RNA, 903 nt, synthetic construct
  misc_feature 1..903: note = Escherichia coli J96__ELL41155.1__Ec(J96)-FimH(N28S_V48C_L55C_N91S_N249Q) CDS opt3
  source 1..903: mol_type = other RNA
atgaagagagtgatcaccctgttcgccgtcctccttatgggctggagcgttaacgcttggtcctttgcatgcaaaacagcctctgggactgcgattcccataggaggtggctcagctaatgtgtacgtaaacctggccccttgtgtgaatgtcgggcagaactgcgtggttgacttgagtacgcaaatcttctgtcacaatgattatccagagaccattacagactacgtgactttacagaggggaagcgcatatggcggtgtcctgtcctctttttcggggaccgtgaagtactcaggaagcagttatccgttccccacaacctccgaaactcctcgggtagtttacaactctcgcacagataaaccatggcccgtggccctatatctcacccctgtcagctccgctggcggcgtggcaatcaaggccgggtcactgattgctgtgcttatcctgcgacagacgaataactacaatagtgacgattttcagttcgtctggaacatatacgccaataacgacgttgtggtaccaactggaggttgcgatgtgagcgcgcgtgacgtcaccgtgacattgcccgattatcctggctctgttccaatcccgctcactgtgtactgtgcaaaatcccaaaatctggggtattacctgtcaggaaccacagccgacgctggcaacagcatttttaccaatacggccagtttctctcccgcacagggtgtcggggtgcagctcactagacagggaacaatcattcctgctaacaacaccgtatccttaggcgccgttggcactagcgcggtgtcgctggggcttacagccaattatgcaaggaccggaggtcaagtcacggctggcaacgtgcagtctatcataggggtcacctttgtgtaccagtga

SEQ ID NO: 226 - RNA, 903 nt, synthetic construct
  misc_feature 1..903: note = Escherichia coli J96__ELL41155.1__Ec(J96)-FimH(F165V) CDS opt3
  source 1..903: mol_type = other RNA
atgaagagagtgatcaccctgttcgccgtcctccttatgggctggagcgttaacgcttggtcctttgcatgcaaaacagccaatgggactgcgattcccataggaggtggctctgctaacgtgtacgtaaatctggcccctgtggtcaacgtggggcagaatttggttgtggacttatcaacgcaaatcttctgtcacaacgattatccagagaccattacagactacgtcactctgcagaggggaagtgcatatggcggtgtgctaagcaatttttccgggaccgtaaagtactctggatcgtcatatccgttccccacaaccagcgaaactcctcgggttgtgtacaacagtcgcacagataaaccatggcccgtcgccctctatctgacccctgtgtcctctgctggcggcgtggcaatcaaggccgggagccttattgctgtcctgatcttgcgacagacgaataactacaattccgacgattttcaggttgtgtggaacatatacgccaataacgacgtagtggtcccaactggaggttgcgatgtgtcagcgcgtgacgttaccgtgacactccccgattatcctggcagtgtcccaatcccgctgactgtgtactgtgcaaaaagccaaaatctggggtattacctctctggaaccacagccgacgctggcaactccattttcaccaacacggcctcatttagccccgcacagggtgtaggggttcagttaactagaaatggaacaatcattcctgctaacaataccgtgagtctgggcgccgtcggcacttctgcggtgtcccttgggttgacagccaactatgcaaggaccggaggtcaggtcacggctggcaatgtgcaaagcatcataggggttaccttcgtgtaccagtga

SEQ ID NO: 227 - RNA, 903 nt, synthetic construct
  misc_feature 1..903: note = Escherichia coli J96__ELL41155.1__Ec(J96)-FimH CDS opt4
  source 1..903: mol_type = other RNA
atgaagagagtgatcaccctgttcgccgtgctgctgatgggctggagcgtgaacgcctggagcttcgcctgcaagaccgccaacggcaccgccatccccatcggcggcggcagcgccaacgtgtacgtgaacctggcccccgtggtgaacgtgggccagaacctggtggtggacctgagcacccagatcttctgccacaacgactaccccgagaccatcaccgactacgtgaccctgcagagaggcagcgcctacggcggcgtgctgagcaacttcagcggcaccgtgaagtacagcggcagcagctaccccttccccaccaccagcgagacccccagagtggtgtacaacagcagaaccgacaagccctggcccgtggccctgtacctgacccccgtgagcagcgccggcggcgtggccatcaaggccggcagcctgatcgccgtgctgatcctgagacagaccaacaactacaacagcgacgacttccagttcgtgtggaacatctacgccaacaacgacgtggtggtgcccaccggcggctgcgacgtgagcgccagagacgtgaccgtgaccctgcccgactaccccggcagcgtgcccatccccctgaccgtgtactgcgccaagagccagaacctgggctactacctgagcggcaccaccgccgacgccggcaacagcatcttcaccaacaccgccagcttcagccccgcccagggcgtgggcgtgcagctgaccagaaacggcaccatcatccccgccaacaacaccgtgagcctgggcgccgtgggcaccagcgccgtgagcctgggcctgaccgccaactacgccagaaccggcggccaggtgaccgccggcaacgtgcagagcatcatcggcgtgaccttcgtgtaccagtga

SEQ ID NO: 228 - RNA, 903 nt, synthetic construct
  misc_feature 1..903: note = Escherichia coli 536__ABG72591.1__Ec(536)-FimH CDS opt4
  source 1..903: mol_type = other RNA
atgaagagagtgatcaccctgttcgccgtgctgctgatgggctggagcgtgaacgcctggagcttcgcctgcaagaccgccaacggcaccgccatccccatcggcggcggcagcgccaacgtgtacgtgaacctggcccccgccgtgaacgtgggccagaacctggtggtggacctgagcacccagatcttctgccacaacgactaccccgagaccatcaccgactacgtgaccctgcagagaggcagcgcctacggcggcgtgctgagcagcttcagcggcaccgtgaagtacaacggcagcagctaccccttccccaccaccagcgagacccccagagtggtgtacaacagcagaaccgacaagccctggcccgtggccctgtacctgacccccgtgagcagcgccggcggcgtggccatcaaggccggcagcctgatcgccgtgctgatcctgagacagaccaacaactacaacagcgacgacttccagttcgtgtggaacatctacgccaacaacgacgtggtggtgcccaccggcggctgcgacgtgagcgccagagacgtgaccgtgaccctgcccgactaccccggcagcgtgcccatccccctgaccgtgtactgcgccaagagccagaacctgggctactacctgagcggcaccaccgccgacgccggcaacagcatcttcaccaacaccgccagcttcagccccgcccagggcgtgggcgtgcagctgaccagaaacggcaccatcatccccgccaacaacaccgtgagcctgggcgccgtgggcaccagcgccgtgagcctgggcctgaccgccaactacgccagaaccggcggccaggtgaccgccggcaacgtgcagagcatcatcggcgtgaccttcgtgtaccagtga

SEQ ID NO: 229 - RNA, 903 nt, synthetic construct
  misc_feature 1..903: note = Escherichia coli CFT073__AAN83822.1__Ec(CFT073)-FimH CDS opt4
  source 1..903: mol_type = other RNA
atgaagagagtgatcaccctgttcgccgtgctgctgatgggctggagcgtgaacgcctggagcttcgcctgcaagaccgccaacggcaccgccatccccatcggcggcggcagcgccaacgtgtacgtgaacctggcccccgccgtgaacgtgggccagaacctggtggtggacctgagcacccagatcttctgccacaacgactaccccgagaccatcaccgactacgtgaccctgcagagaggcagcgcctacggcggcgtgctgagcagcttcagcggcaccgtgaagtacaacggcagcagctaccccttccccaccaccagcgagacccccagagtggtgtacaacagcagaaccgacaagccctggcccgtggccctgtacctgacccccgtgagcagcgccggcggcgtggccatcaaggccggcagcctgatcgccgtgctgatcctgagacagaccaacaactacaacagcgacgacttccagttcgtgtggaacatctacgccaacaacgacgtggtggtgcccaccggcggctgcgacgccagcgccagagacgtgaccgtgaccctgcccgactaccccggcagcgtgcccatccccctgaccgtgtactgcgccaagagccagaacctgggctactacctgagcggcaccaccgccgacgccggcaacagcatcttcaccaacaccgccagcttcagccccgcccagggcgtgggcgtgcagctgaccagaaacggcaccatcatccccgccaacaacaccgtgagcctgggcgccgtgggcaccagcgccgtgagcctgggcctgaccgccaactacgccagaaccggcggccaggtgaccgccggcaacgtgcagagcatcatcggcgtgaccttcgtgtaccagtga

SEQ ID NO: 230 - RNA, 903 nt, synthetic construct
  misc_feature 1..903: note = Escherichia coli IHE3034__AAC35864.1__Ec(IHE3034)-FimH CDS opt4
  source 1..903: mol_type = other RNA
atgaagagagtgatcaccctgttcgccgtgctgctgatgggctggagcgtgaacgcctggagcttcgcctgcaagaccgccaacggcaccgccatccccatcggcggcggcagcgccaacgtgtacgtgaacctggcccccgccgtgaacgtgggccagaacctggtggtggacctgagcacccagatcttctgccacaacgactaccccgagaccatcaccgactacgtgaccctgcagagaggcgccgcctacggcggcgtgctgagcagcttcagcggcaccgtgaagtacaacggcagcagctaccccttccccaccaccagcgagacccccagagtggtgtacaacagcagaaccgacaagccctggcccgtggccctgtacctgacccccgtgagcagcgccggcggcgtggccatcaaggccggcagcctgatcgccgtgctgatcctgagacagaccaacaactacaacagcgacgacttccagttcgtgtggaacatctacgccaacaacgacgtggtggtgcccaccggcggctgcgacgtgagcgccagagacgtgaccgtgaccctgcccgactaccccggcagcgtgcccatccccctgaccgtgtactgcgccaagagccagaacctgggctactacctgagcggcaccaccgccgacgccggcaacagcatcttcaccaacaccgccagcttcagccccgcccagggcgtgggcgtgcagctgaccagaaacggcaccatcatccccgccaacaacaccgtgagcctgggcgccgtgggcaccagcgccgtgagcctgggcctgaccgccaactacgccagaaccggcggccaggtgaccgccggcaacgtgcagagcatcatcggcgtgaccttcgtgtaccagtga

SEQ ID NO: 231 - RNA, 903 nt, synthetic construct
  misc_feature 1..903: note = Escherichia coli NA114__AEG39414.1__Ec(NA114)-FimH CDS opt4
  source 1..903: mol_type = other RNA
atgaagagagtgatcaccctgttcgccgtgctgctgatgggctggagcgtgaacgcctggagcttcgcctgcaagaccgccaacggcaccgccatccccatcggcggcggcagcgccaacgtgtacgtgaacctggcccccgccgtgaacgtgggccagaacctggtggtggacctgagcacccagatcttctgccacaacgactaccccgagaccatcaccgactacgtgaccctgcagagaggcagcgcctacggcggcgtgctgagcaacttcagcggcaccgtgaagtacagcggcagcagctaccccttccccaccaccagcgagacccccagagtggtgtacaacagcagaaccgacaagccctggcccgtggccctgtacctgacccccgtgagcagcgccggcggcgtggccatcaaggccggcagcctgatcgccgtgctgatcctgagacagaccaacaactacaacagcgacgacttccagttcgtgtggaacatctacgccaacaacgacgtggtggtgcccaccggcggctgcgacgtgagcgcccacgacgtgaccgtgaccctgcccgactaccccggcagcgtgcccatccccctgaccgtgtactgcgccaagagccagaacctgggctactacctgagcggcaccaccgccgacgccggcaacagcatcttcaccaacaccgccagcttcagccccgcccagggcgtgggcgtgcagctgaccagaaacggcaccatcatccccgccaacaacaccgtgagcctgggcgccgtgggcaccagcgccgtgagcctgggcctgaccgccaactacgccagaaccggcggccaggtgaccgccggcaacgtgcagagcatcatcggcgtgaccttcgtgtaccagtga

SEQ ID NO: 232 - RNA, 903 nt, synthetic construct
  misc_feature 1..903: note = Escherichia coli F11__WP_000832233.1__Ec(F11)-FimH CDS opt4
  source 1..903: mol_type = other RNA
atgaagagagtgatcaccctgttcgccgtgctgctgatgggctggagcgtgaacgcctggagcttcgcctgcaagaccgccaacggcaccgccatccccatcggcggcggcagcgccaacgtgtacgtgaacctggcccccgccgtgaacgtgggccagaacctggtggtggacctgagcacccagatcttctgccacaacgactaccccgagaccatcaccgactacgtgaccctgcagagaggcagcgcctacggcggcgtgctgagcagcttcagcggcatcgtgaagtacaacggcagcagctaccccttccccaccaccagcgagacccccagagtggtgtacaacagcagaaccgacaagccctggcccgtggccctgtacctgacccccgtgagcagcgccggcggcgtggccatcaaggccggcagcctgatcgccgtgctgatcctgagacagaccaacaactacaacagcgacgacttccagttcgtgtggaacatctacgccaacaacgacgtggtggtgcccaccggcggctgcgacgtgagcgccagagacgtgaccgtgaccctgcccgactaccccggcagcgtgcccatccccctgaccgtgtactgcgccaagagccagaacctgggctactacctgagcggcaccaccgccgacgccggcaacagcatcttcaccaacaccgccagcttcagccccgcccagggcgtgggcgtgcagctgaccagaaacggcaccatcatccccgccaacaacaccgtgagcctgggcgccgtgggcaccagcgccgtgagcctgggcctgaccgccaactacgccagaaccggcggccaggtgaccgccggcaacgtgcagagcatcatcggcgtgaccttcgtgtaccagtga

SEQ ID NO: 233 - RNA, 903 nt, synthetic construct
  misc_feature 1..903: note = Escherichia coli J96__ELL41155.1__Ec(J96)-FimH(N28S_N91S_N249Q) CDS opt4
  source 1..903: mol_type = other RNA
atgaagagagtgatcaccctgttcgccgtgctgctgatgggctggagcgtgaacgcctggagcttcgcctgcaagaccgccagcggcaccgccatccccatcggcggcggcagcgccaacgtgtacgtgaacctggcccccgtggtgaacgtgggccagaacctggtggtggacctgagcacccagatcttctgccacaacgactaccccgagaccatcaccgactacgtgaccctgcagagaggcagcgcctacggcggcgtgctgagcagcttcagcggcaccgtgaagtacagcggcagcagctaccccttccccaccaccagcgagacccccagagtggtgtacaacagcagaaccgacaagccctggcccgtggccctgtacctgacccccgtgagcagcgccggcggcgtggccatcaaggccggcagcctgatcgccgtgctgatcctgagacagaccaacaactacaacagcgacgacttccagttcgtgtggaacatctacgccaacaacgacgtggtggtgcccaccggcggctgcgacgtgagcgccagagacgtgaccgtgaccctgcccgactaccccggcagcgtgcccatccccctgaccgtgtactgcgccaagagccagaacctgggctactacctgagcggcaccaccgccgacgccggcaacagcatcttcaccaacaccgccagcttcagccccgcccagggcgtgggcgtgcagctgaccagacagggcaccatcatccccgccaacaacaccgtgagcctgggcgccgtgggcaccagcgccgtgagcctgggcctgaccgccaactacgccagaaccggcggccaggtgaccgccggcaacgtgcagagcatcatcggcgtgaccttcgtgtaccagtga

SEQ ID NO: 234 - RNA, 903 nt, synthetic construct
  misc_feature 1..903: note = Escherichia coli J96__ELL41155.1__Ec(J96)-FimH(N28S_N91S_N249Q_N256D) CDS opt4
  source 1..903: mol_type = other RNA
atgaagagagtgatcaccctgttcgccgtgctgctgatgggctggagcgtgaacgcctggagcttcgcctgcaagaccgccagcggcaccgccatccccatcggcggcggcagcgccaacgtgtacgtgaacctggcccccgtggtgaacgtgggccagaacctggtggtggacctgagcacccagatcttctgccacaacgactaccccgagaccatcaccgactacgtgaccctgcagagaggcagcgcctacggcggcgtgctgagcagcttcagcggcaccgtgaagtacagcggcagcagctaccccttccccaccaccagcgagacccccagagtggtgtacaacagcagaaccgacaagccctggcccgtggccctgtacctgacccccgtgagcagcgccggcggcgtggccatcaaggccggcagcctgatcgccgtgctgatcctgagacagaccaacaactacaacagcgacgacttccagttcgtgtggaacatctacgccaacaacgacgtggtggtgcccaccggcggctgcgacgtgagcgccagagacgtgaccgtgaccctgcccgactaccccggcagcgtgcccatccccctgaccgtgtactgcgccaagagccagaacctgggctactacctgagcggcaccaccgccgacgccggcaacagcatcttcaccaacaccgccagcttcagccccgcccagggcgtgggcgtgcagctgaccagacagggcaccatcatccccgccgacaacaccgtgagcctgggcgccgtgggcaccagcgccgtgagcctgggcctgaccgccaactacgccagaaccggcggccaggtgaccgccggcaacgtgcagagcatcatcggcgtgaccttcgtgtaccagtga

SEQ ID NO: 235 - RNA, 903 nt, synthetic construct
  misc_feature 1..903: note = Escherichia coli J96__ELL41155.1__Ec(J96)-FimH(N28S_V48C_L55C_N91S_N249Q) CDS opt4
  source 1..903: mol_type = other RNA
atgaagagagtgatcaccctgttcgccgtgctgctgatgggctggagcgtgaacgcctggagcttcgcctgcaagaccgccagcggcaccgccatccccatcggcggcggcagcgccaacgtgtacgtgaacctggccccctgcgtgaacgtgggccagaactgcgtggtggacctgagcacccagatcttctgccacaacgactaccccgagaccatcaccgactacgtgaccctgcagagaggcagcgcctacggcggcgtgctgagcagcttcagcggcaccgtgaagtacagcggcagcagctaccccttccccaccaccagcgagacccccagagtggtgtacaacagcagaaccgacaagccctggcccgtggccctgtacctgacccccgtgagcagcgccggcggcgtggccatcaaggccggcagcctgatcgccgtgctgatcctgagacagaccaacaactacaacagcgacgacttccagttcgtgtggaacatctacgccaacaacgacgtggtggtgcccaccggcggctgcgacgtgagcgccagagacgtgaccgtgaccctgcccgactaccccggcagcgtgcccatccccctgaccgtgtactgcgccaagagccagaacctgggctactacctgagcggcaccaccgccgacgccggcaacagcatcttcaccaacaccgccagcttcagccccgcccagggcgtgggcgtgcagctgaccagacagggcaccatcatccccgccaacaacaccgtgagcctgggcgccgtgggcaccagcgccgtgagcctgggcctgaccgccaactacgccagaaccggcggccaggtgaccgccggcaacgtgcagagcatcatcggcgtgaccttcgtgtaccagtga

SEQ ID NO: 236 - RNA, 903 nt, synthetic construct
  misc_feature 1..903: note = Escherichia coli J96__ELL41155.1__Ec(J96)-FimH(F165V) CDS opt4
  source 1..903: mol_type = other RNA
atgaagagagtgatcaccctgttcgccgtgctgctgatgggctggagcgtgaacgcctggagcttcgcctgcaagaccgccaacggcaccgccatccccatcggcggcggcagcgccaacgtgtacgtgaacctggcccccgtggtgaacgtgggccagaacctggtggtggacctgagcacccagatcttctgccacaacgactaccccgagaccatcaccgactacgtgaccctgcagagaggcagcgcctacggcggcgtgctgagcaacttcagcggcaccgtgaagtacagcggcagcagctaccccttccccaccaccagcgagacccccagagtggtgtacaacagcagaaccgacaagccctggcccgtggccctgtacctgacccccgtgagcagcgccggcggcgtggccatcaaggccggcagcctgatcgccgtgctgatcctgagacagaccaacaactacaacagcgacgacttccaggtggtgtggaacatctacgccaacaacgacgtggtggtgcccaccggcggctgcgacgtgagcgccagagacgtgaccgtgaccctgcccgactaccccggcagcgtgcccatccccctgaccgtgtactgcgccaagagccagaacctgggctactacctgagcggcaccaccgccgacgccggcaacagcatcttcaccaacaccgccagcttcagccccgcccagggcgtgggcgtgcagctgaccagaaacggcaccatcatccccgccaacaacaccgtgagcctgggcgccgtgggcaccagcgccgtgagcctgggcctgaccgccaactacgccagaaccggcggccaggtgaccgccggcaacgtgcagagcatcatcggcgtgaccttcgtgtaccagtga

SEQ ID NO: 237 - RNA, 903 nt, synthetic construct
  misc_feature 1..903: note = Escherichia coli J96__ELL41155.1__Ec(J96)-FimH CDS opt5
  source 1..903: mol_type = other RNA
atgaagagagtgatcaccctgttcgccgtcctcctgatgggctggagcgttaacgcttggtcctttgcctgcaaaacagcgaatgggacggctattcccatcggaggcgggtctgccaacgtgtacgtgaatcttgcccctgtcgtgaacgttggacagaatctggtggtcgacctcagcacccaaattttctgtcacaacgattatccggagacaatcaccgactacgtgacactgcagcggggctccgcttatgggggagttctttctaattttagcggcaccgtgaagtactccggctctagctatcccttccctacaacctccgaaacgccccgcgtcgtgtacaacagcagaaccgataaaccttggcccgtggccctgtatctcacacctgtctcttccgctgggggagttgccattaaggcgggcagcctgatcgccgtgctgatcctccggcagaccaataactacaattctgacgattttcagttcgtgtggaacatttacgctaataacgacgtcgtggttccgacagggggatgcgatgtgtccgcccgcgacgtcaccgtgacgctgcccgattatcctggcagcgttcccatccctcttacagtgtactgtgctaaatctcaaaatctggggtattacctctccggaaccacagccgacgcgggcaacagcatttttaccaacaccgcctccttctctcccgctcagggcgtcggggtgcagctgacaagaaatggaacgatcattccggccaacaataccgtcagccttggcgctgtggggacatccgccgttagcctgggactcaccgccaactatgctcggacaggcggacaggtgaccgcggggaatgtccaatctatcattggcgtgacgtttgtttaccagtga

SEQ ID NO: 238 - RNA, 903 nt, synthetic construct
  misc_feature 1..903: note = Escherichia coli 536__ABG72591.1__Ec(536)-FimH CDS opt5
  source 1..903: mol_type = other RNA
atgaagagagtgatcaccctgttcgccgtcctcctgatgggctggagcgttaacgcttggtcctttgcctgcaaaacagcgaatgggacggctattcccatcggaggcgggtctgccaacgtgtacgtgaatcttgcccctgctgtcaacgtgggacagaatctggttgtggacctcagcacccaaattttctgtcacaacgattatccggagacaatcaccgactacgtcacactgcagcggggctccgcctatgggggagtgctttctagcttttccggcaccgttaagtacaatggctctagctatcccttccctacaacctccgaaacgccccgcgtggtctacaacagcagaaccgataaaccttggcccgtggctctgtatctcacacctgtgtcttccgccgggggagtcgcgattaaggccggcagcctgatcgctgttctgatcctccggcagaccaataactacaattctgacgattttcagttcgtgtggaacatttacgccaataacgacgtggtcgtgccgacagggggatgcgatgtttccgctcgcgacgtgaccgtcacgctgcccgattatcctggcagcgtgcccatccctcttacagtttactgtgccaaatctcaaaatctggggtattacctctccggaaccacagcggacgccggcaacagcatttttaccaacaccgcttccttctctcccgcccagggcgtgggggtccagctgacaagaaatggaacgatcattccggctaacaataccgtgagccttggcgccgtcgggacatccgccgtgagcctgggactcaccgctaactatgcgcggacaggcgggcaggttaccgccggaaatgtgcaatctatcattggcgtcacgtttgtgtaccagtga

SEQ ID NO: 239 - RNA, 903 nt, synthetic construct
  misc_feature 1..903: note = Escherichia coli CFT073__AAN83822.1__Ec(CFT073)-FimH CDS opt5
  source 1..903: mol_type = other RNA
atgaagagagtgatcaccctgttcgccgtcctcctgatgggctggagcgttaacgcttggtcctttgcctgcaaaacagcgaatgggacggctattcccatcggaggcgggtctgccaacgtgtacgtgaatcttgcccctgctgtcaacgtgggacagaatctggttgtggacctcagcacccaaattttctgtcacaacgattatccggagacaatcaccgactacgtcacactgcagcggggctccgcctatgggggagtgctttctagcttttccggcaccgttaagtacaatggctctagctatcccttccctacaacctccgaaacgccccgcgtggtctacaacagcagaaccgataaaccttggcccgtggctctgtatctcacacctgtgtcttccgccgggggagtcgcgattaaggccggcagcctgatcgctgttctgatcctccggcagaccaataactacaattctgacgattttcagttcgtgtggaacatttacgccaataacgacgtggtcgtgccgacagggggatgcgatgcttccgcccgcgacgttaccgtgacgctgcccgattatcctggcagcgtccccatccctcttacagtgtactgtgcgaaatctcaaaatctggggtattacctctccggaaccacagccgacgctggcaacagcatttttaccaacaccgcctccttctctcccgctcagggcgttggggtgcagctgacaagaaatggaacgatcattccggccaacaataccgtcagccttggcgccgtggggacatccgctgtcagcctgggactcaccgcgaactatgcccggacaggcggacaggtgaccgctgggaatgttcaatctatcattggcgtgacgtttgtctaccagtga

SEQ ID NO: 240 - RNA, 903 nt, synthetic construct
  misc_feature 1..903: note = Escherichia coli IHE3034__AAC35864.1__Ec(IHE3034)-FimH CDS opt5
  source 1..903: mol_type = other RNA
atgaagagagtgatcaccctgttcgccgtcctcctgatgggctggagcgttaacgcttggtcctttgcctgcaaaacagcgaatgggacggctattcccatcggaggcgggtctgccaacgtgtacgtgaatcttgcccctgctgtcaacgtgggacagaatctggttgtggacctcagcacccaaattttctgtcacaacgattatccggagacaatcaccgactacgtcacactgcagcggggcgccgcttatgggggagtgctttcctcttttagcggcaccgttaagtacaatggctcctcttatcccttccctacaaccagcgaaacgccccgcgtggtctacaactccagaaccgataaaccttggcccgtggccctgtatctcacacctgtgagctctgccgggggagtcgcgattaaggctggctccctgatcgccgttctgatcctccggcagaccaataactacaatagcgacgattttcagttcgtgtggaacatttacgctaataacgacgtggtcgtgccgacagggggatgcgatgtttctgcccgcgacgtgaccgtcacgctgcccgattatcctggctccgtgcccatccctcttacagtttactgtgcgaaaagccaaaatctggggtattacctctctggaaccacagccgacgctggcaactccatttttaccaacaccgccagcttctcccccgctcagggcgtgggggtccagctgacaagaaatggaacgatcattccggccaacaataccgtgtctcttggcgccgtcgggacaagcgctgtgtccctgggactcaccgcgaactatgcccggacaggcgggcaggttaccgctggaaatgtgcaaagcatcattggcgtcacgtttgtgtaccagtga

SEQ ID NO: 241 - RNA, 903 nt, synthetic construct
  misc_feature 1..903: note = Escherichia coli NA114__AEG39414.1__Ec(NA114)-FimH CDS opt5
  source 1..903: mol_type = other RNA
atgaagagagtgatcaccctgttcgccgtcctcctgatgggctggagcgttaacgcttggtcctttgcctgcaaaacagcgaatgggacggctattcccatcggaggcgggtctgccaacgtgtacgtgaatcttgcccctgctgtcaacgtgggacagaatctggttgtggacctcagcacccaaattttctgtcacaacgattatccggagacaatcaccgactacgtcacactgcagcggggctccgcctatgggggagtgctttctaattttagcggcaccgttaagtactccggctctagctatcccttccctacaacctccgaaacgccccgcgtggtctacaacagcagaaccgataaaccttggcccgtggctctgtatctcacacctgtgtcttccgccgggggagtcgcgattaaggccggcagcctgatcgctgttctgatcctccggcagaccaataactacaattctgacgattttcagttcgtgtggaacatttacgccaataacgacgtggtcgtgccgacagggggatgcgatgtttccgctcatgacgtgaccgtcacgctgcccgattatcctggcagcgtgcccatccctcttacagtttactgtgccaaatctcaaaatctggggtattacctctccggaaccacagcggacgccggcaacagcatttttaccaacaccgcttccttctctcccgcccagggcgtgggggtccagctgacacgcaatggaacgatcattccggctaacaataccgtgagccttggcgccgtcgggacatccgccgtgagcctgggactcaccgctaactatgcgagaacaggcgggcaggttaccgccggaaatgtgcaatctatcattggcgtcacgtttgtgtaccagtga

SEQ ID NO: 242 - RNA, 903 nt, synthetic construct
  misc_feature 1..903: note = Escherichia coli F11__WP_000832233.1__Ec(F11)-FimH CDS opt5
  source 1..903: mol_type = other RNA
atgaagagagtgatcaccctgttcgccgtcctcctgatgggctggagcgttaacgcttggtcctttgcctgcaaaacagcgaatgggacggctattcccatcggaggcgggtctgccaacgtgtacgtgaatcttgcccctgctgtcaacgtgggacagaatctggttgtggacctcagcacccaaattttctgtcacaacgattatccggagacaatcaccgactacgtcacactgcagcggggctccgcctatgggggagtgctttctagcttttccggcattgttaagtacaatggctctagctatcccttccctaccacatccgaaacgccccgcgtggtctacaacagcagaaccgataaaccttggcccgtggctctgtatctcacccctgtgtcttccgccgggggagtcgcgatcaaggccggcagcctgatcgctgttctgattctccggcagacaaataactacaattctgacgattttcagttcgtgtggaacatctacgccaataacgacgtggtcgtgccgaccgggggatgcgatgtttccgctcgcgacgtgacagtcaccctgcccgattatcctggcagcgtgcccattcctcttacggtttactgtgccaaatctcaaaatctggggtattacctctccggaacaaccgcggacgccggcaacagcatctttacaaacaccgcttccttctctcccgcccagggcgtgggggtccagctgaccagaaatggaacaattatcccggctaacaatacggtgagccttggcgccgtcgggacctccgccgtgagcctgggactcacagctaactatgcgcggaccggcgggcaggttacagccggaaatgtgcaatctattatcggcgtcacctttgtgtaccagtga

SEQ ID NO: 243 - RNA, 903 nt, synthetic construct
  misc_feature 1..903: note = Escherichia coli J96__ELL41155.1__Ec(J96)-FimH(N28S_N91S_N249Q) CDS opt5
  source 1..903: mol_type = other RNA
atgaagagagtgatcaccctgttcgccgtcctcctgatgggctggagcgttaacgcttggtcctttgcctgcaaaacagcgtctgggacggctattcccatcggaggcgggagcgccaatgtgtacgtgaaccttgcccctgtcgtgaatgttggacagaacctggtggtcgacctctccacccaaattttctgtcacaatgattatccggagacaatcaccgactacgtgacactgcagcggggctctgcttatgggggagttcttagctccttttctggcaccgtgaagtacagcggctccagctatcccttccctacaacctctgaaacgccccgcgtcgtgtacaactccagaaccgataaaccttggcccgtggccctgtatctcacacctgtcagctctgctgggggagttgccattaaggcgggctccctgatcgccgtgctgatcctccggcagaccaataactacaatagcgacgattttcagttcgtgtggaacatttacgctaataacgacgtcgtggttccgacagggggatgcgatgtgtctgcccgcgacgtcaccgtgacgctgcccgattatcctggctccgttcccatccctcttacagtgtactgtgctaaaagccaaaatctggggtattacctctccggaaccacagccgacgcgggcaactctatttttaccaataccgccagcttctcccccgctcagggcgtcggggtgcagctgacaagacagggaacgatcattccggccaacaacaccgtcagccttggcgctgtggggacatctgccgtttccctgggactcaccgccaattatgctcggacaggcgggcaagtgaccgcgggaaacgtccagagcatcattggcgtgacgtttgtttaccagtga

SEQ ID NO: 244 - RNA, 903 nt, synthetic construct
  misc_feature 1..903: note = Escherichia coli J96__ELL41155.1__Ec(J96)-FimH(N28S_N91S_N249Q_N256D) CDS opt5
  source 1..903: mol_type = other RNA
atgaagagagtgatcaccctgttcgccgtcctcctgatgggctggagcgttaacgcttggtcctttgcctgcaaaacagcgtctgggacggctattcccatcggaggcgggagcgccaatgtgtacgtgaaccttgcccctgtcgtgaatgttggacagaacctggtggtcgacctctccacccaaattttctgtcacaatgattatccggagacaatcaccgactacgtgacactgcagcggggctctgcttatgggggagttcttagctccttttctggcaccgtgaagtacagcggctccagctatcccttccctacaacctctgaaacgccccgcgtcgtgtacaactccagaaccgataaaccttggcccgtggccctgtatctcacacctgtcagctctgctgggggagttgccattaaggcgggctccctgatcgccgtgctgatcctccggcagaccaataactacaatagcgacgattttcagttcgtgtggaacatttacgctaataacgacgtcgtggttccgacagggggatgcgatgtgtctgcccgcgacgtcaccgtgacgctgcccgattatcctggctccgttcccatccctcttacagtgtactgtgctaaaagccaaaatctggggtattacctctccggaaccacagccgacgcgggcaactctatttttaccaataccgccagcttctcccccgctcagggcgtcggggtgcagctgacaagacagggaacgatcattccggccgataacaccgtcagccttggcgctgtggggacatctgccgtttccctgggactcaccgccaactatgctcggacaggcgggcaagtgaccgcgggaaatgtccagagcatcattggcgtgacgtttgtttaccagtga

SEQ ID NO: 245 - RNA, 903 nt, synthetic construct
  misc_feature 1..903: note = Escherichia coli J96__ELL41155.1__Ec(J96)-FimH(N28S_V48C_L55C_N91S_N249Q) CDS opt5
  source 1..903: mol_type = other RNA
atgaagagagtgatcaccctgttcgccgtcctcctgatgggctggagcgttaacgcttggtcctttgcctgcaaaacagcgtctgggacggctattcccatcggaggcgggagcgccaatgtgtacgtgaaccttgccccttgtgtcaatgtgggacagaactgcgttgtggacctgtccacccaaattttctgtcacaatgattatccggagacaatcaccgactacgtcacactccagcggggctctgcttatgggggagtgctgagctccttttctggcaccgttaagtacagcggctccagctatcccttccctacaacctctgaaacgccccgcgtggtctacaactccagaaccgataaaccttggcccgtggccctttatctgacacctgtgagctctgctgggggagtcgccattaaggcgggctccctcatcgccgttctgatcctgcggcagaccaataactacaatagcgacgattttcagttcgtgtggaacatttacgctaataacgacgtggtcgtgccgacagggggatgcgatgtttctgcccgcgacgtgaccgtcacgctccccgattatcctggctccgtgcccatccctctgacagtttactgtgctaaaagccaaaatcttgggtattacctgtccggaaccacagccgacgcgggcaactctatttttaccaataccgccagcttctcccccgctcagggcgtgggggtccagctcacaagacagggaacgatcattccggccaacaacaccgtgagcctgggcgctgtcgggacatctgccgtgtcccttggactgaccgccaattatgctcggacaggcgggcaagttaccgcgggaaacgtgcagagcatcattggcgtcacgtttgtgtaccagtga

SEQ ID NO: 246 - RNA, 903 nt, synthetic construct
  misc_feature 1..903: note = Escherichia coli J96__ELL41155.1__Ec(J96)-FimH(F165V) CDS opt5
  source 1..903: mol_type = other RNA
atgaagagagtgatcaccctgttcgccgtcctcctgatgggctggagcgttaacgcttggtcctttgcctgcaaaacagcgaatgggacggctattcccatcggaggcgggtctgccaacgtgtacgtgaatcttgcccctgtcgtgaacgttggacagaatctggtggtcgacctcagcacccaaattttctgtcacaacgattatccggagacaatcaccgactacgtgacactgcagcggggctccgcttatgggggagttctttctaattttagcggcaccgtgaagtactccggctctagctatcccttccctacaacctccgaaacgccccgcgtcgtgtacaacagcagaaccgataaaccttggcccgtggccctgtatctcacacctgtctcttccgctgggggagttgccattaaggcgggcagcctgatcgccgtgctgatcctccggcagaccaataactacaattctgacgattttcaggtggtctggaacatttacgctaataacgacgtggttgtgccgacagggggatgcgatgtctccgcccgcgacgtgaccgttacgctgcccgattatcctggcagcgtgcccatccctcttacagtctactgtgctaaatctcaaaatctggggtattacctctccggaaccacagccgacgcgggcaacagcattttcaccaacaccgcctccttttctcccgctcagggcgtgggggtccagctgacaagaaatggaacgatcattccggccaacaataccgtgagccttggcgctgttgggacatccgccgtgagcctgggactcaccgccaactatgctcggacaggcgggcaggtcaccgcgggaaatgtgcaatctatcattggcgttacgttcgtgtaccagtga

SEQ ID NO: 247 - protein, 279 aa, Escherichia coli
  REGION 1..279: note = Escherichia coli J96__ELL41155.1__Ec(J96)-FimH(22-300) protein
FACKTANGTAIPIGGGSANVYVNLAPVVNVGQNLVVDLSTQIFCHNDYPETITDYVTLQRGSAYGGVLSNFSGTVKYSGSSYPFPTTSETPRVVYNSRTDKPWPVALYLTPVSSAGGVAIKAGSLIAVLILRQTNNYNSDDFQFVWNIYANNDVVVPTGGCDVSARDVTVTLPDYPGSVPIPLTVYCAKSQNLGYYLSGTTADAGNSIFTNTASFSPAQGVGVQLTRNGTIIPANNTVSLGAVGTSAVSLGLTANYARTGGQVTAGNVQSIIGVTFVYQ

SEQ ID NO: 248 - protein, 279 aa, Escherichia coli
  REGION 1..279: note = Escherichia coli 536__ABG72591.1__Ec(536)-FimH(22-300) protein
FACKTANGTAIPIGGGSANVYVNLAPAVNVGQNLVVDLSTQIFCHNDYPETITDYVTLQRGSAYGGVLSSFSGTVKYNGSSYPFPTTSETPRVVYNSRTDKPWPVALYLTPVSSAGGVAIKAGSLIAVLILRQTNNYNSDDFQFVWNIYANNDVVVPTGGCDVSARDVTVTLPDYPGSVPIPLTVYCAKSQNLGYYLSGTTADAGNSIFTNTASFSPAQGVGVQLTRNGTIIPANNTVSLGAVGTSAVSLGLTANYARTGGQVTAGNVQSIIGVTFVYQ

SEQ ID NO: 249 - protein, 279 aa, Escherichia coli
  REGION 1..279: note = Escherichia coli CFT073__AAN83822.1__Ec(CFT073)-FimH(22-300) protein
FACKTANGTAIPIGGGSANVYVNLAPAVNVGQNLVVDLSTQIFCHNDYPETITDYVTLQRGSAYGGVLSSFSGTVKYNGSSYPFPTTSETPRVVYNSRTDKPWPVALYLTPVSSAGGVAIKAGSLIAVLILRQTNNYNSDDFQFVWNIYANNDVVVPTGGCDASARDVTVTLPDYPGSVPIPLTVYCAKSQNLGYYLSGTTADAGNSIFTNTASFSPAQGVGVQLTRNGTIIPANNTVSLGAVGTSAVSLGLTANYARTGGQVTAGNVQSIIGVTFVYQ

SEQ ID NO: 250 - protein, 279 aa, Escherichia coli
  REGION 1..279: note = Escherichia coli IHE3034__AAC35864.1__Ec(IHE3034)-FimH(22-300) protein
FACKTANGTAIPIGGGSANVYVNLAPAVNVGQNLVVDLSTQIFCHNDYPETITDYVTLQRGAAYGGVLSSFSGTVKYNGSSYPFPTTSETPRVVYNSRTDKPWPVALYLTPVSSAGGVAIKAGSLIAVLILRQTNNYNSDDFQFVWNIYANNDVVVPTGGCDVSARDVTVTLPDYPGSVPIPLTVYCAKSQNLGYYLSGTTADAGNSIFTNTASFSPAQGVGVQLTRNGTIIPANNTVSLGAVGTSAVSLGLTANYARTGGQVTAGNVQSIIGVTFVYQ

SEQ ID NO: 251 - protein, 279 aa, Escherichia coli
  REGION 1..279: note = Escherichia coli NA114__AEG39414.1__Ec(NA114)-FimH(22-300) protein
FACKTANGTAIPIGGGSANVYVNLAPAVNVGQNLVVDLSTQIFCHNDYPETITDYVTLQRGSAYGGVLSNFSGTVKYSGSSYPFPTTSETPRVVYNSRTDKPWPVALYLTPVSSAGGVAIKAGSLIAVLILRQTNNYNSDDFQFVWNIYANNDVVVPTGGCDVSAHDVTVTLPDYPGSVPIPLTVYCAKSQNLGYYLSGTTADAGNSIFTNTASFSPAQGVGVQLTRNGTIIPANNTVSLGAVGTSAVSLGLTANYARTGGQVTAGNVQSIIGVTFVYQ

SEQ ID NO: 252 - protein, 279 aa, Escherichia coli
  REGION 1..279: note = Escherichia coli F11__WP_000832233.1__Ec(F11)-FimH(22-300) protein
FACKTANGTAIPIGGGSANVYVNLAPAVNVGQNLVVDLSTQIFCHNDYPETITDYVTLQRGSAYGGVLSSFSGIVKYNGSSYPFPTTSETPRVVYNSRTDKPWPVALYLTPVSSAGGVAIKAGSLIAVLILRQTNNYNSDDFQFVWNIYANNDVVVPTGGCDVSARDVTVTLPDYPGSVPIPLTVYCAKSQNLGYYLSGTTADAGNSIFTNTASFSPAQGVGVQLTRNGTIIPANNTVSLGAVGTSAVSLGLTANYARTGGQVTAGNVQSIIGVTFVYQ

SEQ ID NO: 253 - protein, 279 aa, synthetic construct
  REGION 1..279: note = Escherichia coli J96__ELL41155.1__Ec(J96)-FimH(22-300_N28S_N91S_N249Q) protein
FACKTASGTAIPIGGGSANVYVNLAPVVNVGQNLVVDLSTQIFCHNDYPETITDYVTLQRGSAYGGVLSSFSGTVKYSGSSYPFPTTSETPRVVYNSRTDKPWPVALYLTPVSSAGGVAIKAGSLIAVLILRQTNNYNSDDFQFVWNIYANNDVVVPTGGCDVSARDVTVTLPDYPGSVPIPLTVYCAKSQNLGYYLSGTTADAGNSIFTNTASFSPAQGVGVQLTRQGTIIPANNTVSLGAVGTSAVSLGLTANYARTGGQVTAGNVQSIIGVTFVYQ

SEQ ID NO: 254 - protein, 279 aa, synthetic construct
  REGION 1..279: note = Escherichia coli J96__ELL41155.1__Ec(J96)-FimH(22-300_N28S_N91S_N249Q_N256D) protein
FACKTASGTAIPIGGGSANVYVNLAPVVNVGQNLVVDLSTQIFCHNDYPETITDYVTLQRGSAYGGVLSSFSGTVKYSGSSYPFPTTSETPRVVYNSRTDKPWPVALYLTPVSSAGGVAIKAGSLIAVLILRQTNNYNSDDFQFVWNIYANNDVVVPTGGCDVSARDVTVTLPDYPGSVPIPLTVYCAKSQNLGYYLSGTTADAGNSIFTNTASFSPAQGVGVQLTRQGTIIPADNTVSLGAVGTSAVSLGLTANYARTGGQVTAGNVQSIIGVTFVYQ

SEQ ID NO: 255 - protein, 279 aa, synthetic construct
  REGION 1..279: note = Escherichia coli J96__ELL41155.1__Ec(J96)-FimH(22-300_N28S_V48C_L55C_N91S_N2 49Q) protein
FACKTASGTAIPIGGGSANVYVNLAPCVNVGQNCVVDLSTQIFCHNDYPETITDYVTLQRGSAYGGVLSSFSGTVKYSGSSYPFPTTSETPRVVYNSRTDKPWPVALYLTPVSSAGGVAIKAGSLIAVLILRQTNNYNSDDFQFVWNIYANNDVVVPTGGCDVSARDVTVTLPDYPGSVPIPLTVYCAKSQNLGYYLSGTTADAGNSIFTNTASFSPAQGVGVQLTRQGTIIPANNTVSLGAVGTSAVSLGLTANYARTGGQVTAGNVQSIIGVTFVYQ

SEQ ID NO: 256 - protein, 279 aa, synthetic construct
  REGION 1..279: note = Escherichia coli J96__ELL41155.1__Ec(J96)-FimH(22-300_F165V) protein
FACKTANGTAIPIGGGSANVYVNLAPVVNVGQNLVVDLSTQIFCHNDYPETITDYVTLQRGSAYGGVLSNFSGTVKYSGSSYPFPTTSETPRVVYNSRTDKPWPVALYLTPVSSAGGVAIKAGSLIAVLILRQTNNYNSDDFQVVWNIYANNDVVVPTGGCDVSARDVTVTLPDYPGSVPIPLTVYCAKSQNLGYYLSGTTADAGNSIFTNTASFSPAQGVGVQLTRNGTIIPANNTVSLGAVGTSAVSLGLTANYARTGGQVTAGNVQSIIGVTFVYQ

SEQ ID NO: 257 - RNA, 837 nt, Escherichia coli
  misc_feature 1..837: note = Escherichia coli J96__ELL41155.1__Ec(J96)-FimH(22-300) CDS wt
  source 1..837: mol_type = mRNA
ttcgcctgtaaaaccgccaatggtaccgctatccctattggcggtggcagcgccaatgtttatgtaaaccttgcgcccgtcgtgaatgtggggcaaaacctggtcgtggatctttcgacgcaaatcttttgccataacgattatccggaaaccattacagactatgtcacactgcaacgaggctcggcttatggcggcgtgttatctaatttttccgggaccgtaaaatatagtggcagtagctatccatttcctaccaccagcgaaacgccgcgcgttgtttataattcgagaacggataagccgtggccggtggcgctttatttgacgcctgtgagcagtgcgggcggggtggcgattaaagctggctcattaattgccgtgcttattttgcgacagaccaacaactataacagcgatgatttccagtttgtgtggaatatttacgccaataatgatgtggtggtgcctactggcggctgcgatgtttctgctcgtgatgtcaccgttactctgccggactaccctggttcagtgccaattcctcttaccgtttattgtgcgaaaagccaaaacctggggtattacctctccggcacaaccgcagatgcgggcaactcgattttcaccaataccgcgtcgttttcacctgcacagggcgtcggcgtacagttgacgcgcaacggtacgattattccagcgaataacacggtatcgttaggagcagtagggacttcggcggtgagtctgggattaacggcaaattatgcacgtaccggagggcaggtgactgcagggaatgtgcaatcgattattggcgtgacttttgtttatcaa

SEQ ID NO: 258 - RNA, 837 nt, Escherichia coli
  misc_feature 1..837: note = Escherichia coli 536__ABG72591.1__Ec(536)-FimH(22-300) CDS wt
  source 1..837: mol_type = mRNA
ttcgcctgtaaaaccgccaatggtaccgctatccctattggtggtggcagcgccaatgtttatgtaaaccttgcgcctgccgtgaatgtggggcaaaacctggtcgtggatctttcgacgcaaatcttttgccataacgattacccggaaaccattacagactatgtcacactgcaacgaggttcggcttatggcggcgtgttatctagtttttccgggaccgtaaaatataatggcagtagctatcctttccctactaccagcgaaacgccgcgggttgtttataattcgagaacggataagccgtggccggtggcgctttatttgacgcctgtgagcagtgcggggggagtggcgattaaagctggctcattaattgccgtgcttattttgcgacagaccaacaactataacagcgatgatttccagtttgtgtggaatatttacgccaataatgatgtggtggtgcccactggcggctgtgatgtttctgctcgtgatgtcaccgttactttgccggactaccctggttcagtgccgattcctcttaccgtttattgtgcgaaaagccaaaacctggggtattacctctccggcacaaccgcagatgcgggcaactcgattttcaccaataccgcgtcgttttcacccgcgcagggcgtcggcgtacagttgacgcgcaacggtacgattattccagcgaataacacggtatcgttaggagcagtagggacttcggcggtaagtctgggattaacggcaaattacgcacgtaccggagggcaggtgactgcagggaatgtgcaatcgattattggcgtgacttttgtttatcaa

SEQ ID NO: 259 - RNA, 837 nt, Escherichia coli
  misc_feature 1..837: note = Escherichia coli CFT073__AAN83822.1__Ec(CFT073)-FimH(22-300) CDS wt
  source 1..837: mol_type = mRNA
ttcgcctgtaaaaccgccaatggtaccgcaatccctattggcggtggcagcgccaatgtttatgtaaaccttgcgcctgccgtgaatgtggggcaaaacctggtcgtagatctttcgacgcaaatcttttgccataacgattacccagaaaccattacagactatgtcacactgcaacgaggttcggcttatggcggcgtgttatctagtttttccgggaccgtaaaatataatggcagtagctatcctttccctactaccagcgaaacgccgcgggttgtttataattcgagaacggataagccgtggccggtggcgctttatttgacgccggtgagcagtgcggggggagtggcgattaaagctggctcattaattgccgtgcttattttgcgacagaccaacaactataacagcgatgatttccagtttgtgtggaatatttacgccaataatgatgtggtggtgcccactggcggctgtgatgcttctgctcgtgatgtcaccgttactctgccggactaccctggttcagtgccgattcctcttaccgtttattgtgcgaaaagccaaaacctggggtattacctatccggcacaaccgcagatgcgggcaactcgattttcaccaataccgcgtcgttttcacccgcgcagggcgtcggcgtacagttgacgcgcaacggtacgattattccagcgaataacacggtatcgttaggagcagtagggacttcggcggtaagtctgggattaacggcaaattacgcacgtaccggagggcaggtgactgcagggaatgtgcaatcgattattggcgtgacttttgtttatcaa

SEQ ID NO: 260 - RNA, 837 nt, Escherichia coli
  misc_feature 1..837: note = Escherichia coli IHE3034__AAC35864.1__Ec(IHE3034)-FimH(22-300) CDS wt
  source 1..837: mol_type = mRNA
ttcgcctgtaaaaccgccaatggtaccgcaatccctattggcggtggcagcgccaatgtttatgtaaaccttgcgcctgccgtgaatgtggggcaaaacctggtcgtagatctttcgacgcaaatcttttgccataacgattacccagaaaccattacagactatgtcacactgcaacgaggtgcggcttatggcggcgtgttatctagtttttccgggaccgtaaaatataatggcagtagctatcctttccctactaccagcgaaacgccgcgggttgtttataattcgagaacggataagccgtggccggtggcgctttatttgacgccggtgagcagtgcggggggagtggcgattaaagctggctcattaattgccgtgcttattttgcgacagaccaacaactataacagcgatgatttccagtttgtgtggaatatttacgccaataatgatgtggtggtgcccactggcggctgcgatgtttctgctcgtgatgtcaccgttactctgccggactaccctggttcagtgccgattcctcttaccgtttattgtgcgaaaagccaaaacctggggtattacctctccggcacaaccgcagatgcgggcaactcgattttcaccaataccgcgtcgttttcacccgcgcagggcgtcggcgtacagttgacgcgcaacggtacgattattccagcgaataacacggtatcgttaggagcagtagggacttcggcggtaagtctgggattaacggcaaattacgcacgtaccggagggcaggtgactgcagggaatgtgcaatcgattattggcgtgacttttgtttatcaa

SEQ ID NO: 261 - RNA, 837 nt, Escherichia coli
  misc_feature 1..837: note = Escherichia coli NA114__AEG39414.1__Ec(NA114)-FimH(22-300) CDS wt
  source 1..837: mol_type = mRNA
ttcgcctgtaaaaccgccaatggtaccgctattcctattggcggtggcagcgctaatgtttatgtaaaccttgcgcctgccgtgaatgtggggcaaaacctggtcgtagatctttcgacgcaaatcttttgccataacgattatccggaaaccattacagactatgtcacactgcaacgaggctcggcttatggcggcgtgttatctaatttttccgggaccgtaaaatatagtggcagtagctatccatttccgactaccagcgaaacgccgcgggttgtttataattcgagaacggataagccgtggccggtggcgctttatttgacgcctgtgagcagtgcgggtggggtggcgattaaagctggctcattaattgccgtgcttattttgcgacagaccaacaactataacagcgatgatttccagtttgtgtggaatatttacgccaataatgatgtggtggtgcctactggcggctgcgatgtttctgctcatgatgtcaccgttactctgccggactaccctggttcagtgccaattcctcttaccgtttattgtgcgaaaagccaaaacctggggtattacctctccggcacaaccgcagatgcgggcaactcgattttcaccaataccgcgtcgttttcaccagcgcagggcgtcggcgtacagttgacgcgcaacggtacgattattccagcgaataacacggtatcgttaggagcagtagggacttcggcggtaagtctgggattaacggcaaattacgcacgtaccggagggcaggtgactgcagggaatgtgcaatcgattattggcgtgacttttgtttatcaa

SEQ ID NO: 262 - RNA, 837 nt, Escherichia coli
  misc_feature 1..837: note = Escherichia coli F11__WP_000832233.1__Ec(F11)-FimH(22-300) CDS wt
  source 1..837: mol_type = mRNA
ttcgcctgtaaaaccgccaatggtaccgctatccctattggcggtggcagcgccaatgtttatgtaaaccttgcgcctgccgtgaatgtggggcaaaacctggtcgtggatctttcgacgcaaatcttttgccataacgattacccggaaaccattacagactatgtcacactgcaacgaggttcggcttatggcggcgtgttatctagtttttccgggatcgtaaaatataatggcagtagctatcctttccctactaccagcgaaacgccgcgggttgtttataattcgagaacggataagccgtggccggtggcgctttatttgacgcctgtgagcagtgcggggggagtggcgattaaagctggctcattaattgccgtgcttattttgcgacagaccaacaactataacagcgatgatttccagtttgtgtggaatatttacgccaataatgatgtggtggtgcccactggcggctgtgatgtttctgctcgtgatgtcaccgttactttgccggactaccctggttcagtgccgattcctcttaccgtttattgtgcgaaaagccaaaacctggggtattacctctccggcacaaccgcagatgcgggcaactcgattttcaccaataccgcgtcgttttcacccgcgcagggcgtcggcgtacagttgacgcgcaacggtacgattattccagcgaataacacggtatcgttaggagcagtagggacttcggcggtaagtctgggattaacggcaaattacgcacgtaccggagggcaggtgactgcagggaatgtgcaatcgattattggcgtgacttttgtttatcaa

SEQ ID NO: 263 - RNA, 837 nt, synthetic construct
  misc_feature 1..837: note = Escherichia coli J96__ELL41155.1__Ec(J96)-FimH(22-300_N28S_N91S_N249Q) CDS wt
  source 1..837: mol_type = other RNA
ttcgcctgtaaaaccgccagcggtaccgctatccctattggcggtggcagcgccaatgtttatgtaaaccttgcgcccgtcgtgaatgtggggcaaaacctggtcgtggatctttcgacgcaaatcttttgccataacgattatccggaaaccattacagactatgtcacactgcaacgaggctcggcttatggcggcgtgttatctagcttttccgggaccgtaaaatatagtggcagtagctatccatttcctaccaccagcgaaacgccgcgcgttgtttataattcgagaacggataagccgtggccggtggcgctttatttgacgcctgtgagcagtgcgggcggggtggcgattaaagctggctcattaattgccgtgcttattttgcgacagaccaacaactataacagcgatgatttccagtttgtgtggaatatttacgccaataatgatgtggtggtgcctactggcggctgcgatgtttctgctcgtgatgtcaccgttactctgccggactaccctggttcagtgccaattcctcttaccgtttattgtgcgaaaagccaaaacctggggtattacctctccggcacaaccgcagatgcgggcaactcgattttcaccaataccgcgtcgttttcacctgcacagggcgtcggcgtacagttgacgcgccagggtacgattattccagcgaataacacggtatcgttaggagcagtagggacttcggcggtgagtctgggattaacggcaaattatgcacgtaccggagggcaggtgactgcagggaatgtgcaatcgattattggcgtgacttttgtttatcaa

SEQ ID NO: 264 - RNA, 837 nt, synthetic construct
  misc_feature 1..837: note = Escherichia coli J96__ELL41155.1__Ec(J96)-FimH(22-300_N28S_N91S_N249Q_N256D) CDS wt
  source 1..837: mol_type = other RNA
ttcgcctgtaaaaccgccagcggtaccgctatccctattggcggtggcagcgccaatgtttatgtaaaccttgcgcccgtcgtgaatgtggggcaaaacctggtcgtggatctttcgacgcaaatcttttgccataacgattatccggaaaccattacagactatgtcacactgcaacgaggctcggcttatggcggcgtgttatctagcttttccgggaccgtaaaatatagtggcagtagctatccatttcctaccaccagcgaaacgccgcgcgttgtttataattcgagaacggataagccgtggccggtggcgctttatttgacgcctgtgagcagtgcgggcggggtggcgattaaagctggctcattaattgccgtgcttattttgcgacagaccaacaactataacagcgatgatttccagtttgtgtggaatatttacgccaataatgatgtggtggtgcctactggcggctgcgatgtttctgctcgtgatgtcaccgttactctgccggactaccctggttcagtgccaattcctcttaccgtttattgtgcgaaaagccaaaacctggggtattacctctccggcacaaccgcagatgcgggcaactcgattttcaccaataccgcgtcgttttcacctgcacagggcgtcggcgtacagttgacgcgccagggtacgattattccagcggacaacacggtatcgttaggagcagtagggacttcggcggtgagtctgggattaacggcaaattatgcacgtaccggagggcaggtgactgcagggaatgtgcaatcgattattggcgtgacttttgtttatcaa

SEQ ID NO: 265 - RNA, 837 nt, synthetic construct
  misc_feature 1..837: note = Escherichia coli J96__ELL41155.1__Ec(J96)-FimH(22-300_N28S_V48C_L55C_N91S_N2 49Q) CDS wt
  source 1..837: mol_type = other RNA
ttcgcctgtaaaaccgccagcggtaccgctatccctattggcggtggcagcgccaatgtttatgtaaaccttgcgccctgcgtgaatgtggggcaaaactgcgtcgtggatctttcgacgcaaatcttttgccataacgattatccggaaaccattacagactatgtcacactgcaacgaggctcggcttatggcggcgtgttatctagcttttccgggaccgtaaaatatagtggcagtagctatccatttcctaccaccagcgaaacgccgcgcgttgtttataattcgagaacggataagccgtggccggtggcgctttatttgacgcctgtgagcagtgcgggcggggtggcgattaaagctggctcattaattgccgtgcttattttgcgacagaccaacaactataacagcgatgatttccagtttgtgtggaatatttacgccaataatgatgtggtggtgcctactggcggctgcgatgtttctgctcgtgatgtcaccgttactctgccggactaccctggttcagtgccaattcctcttaccgtttattgtgcgaaaagccaaaacctggggtattacctctccggcacaaccgcagatgcgggcaactcgattttcaccaataccgcgtcgttttcacctgcacagggcgtcggcgtacagttgacgcgccagggtacgattattccagcgaataacacggtatcgttaggagcagtagggacttcggcggtgagtctgggattaacggcaaattatgcacgtaccggagggcaggtgactgcagggaatgtgcaatcgattattggcgtgacttttgtttatcaa

SEQ ID NO: 266 - RNA, 837 nt, synthetic construct
  misc_feature 1..837: note = Escherichia coli J96__ELL41155.1__Ec(J96)-FimH(22-300_F165V) CDS wt
  source 1..837: mol_type = other RNA
ttcgcctgtaaaaccgccaatggtaccgctatccctattggcggtggcagcgccaatgtttatgtaaaccttgcgcccgtcgtgaatgtggggcaaaacctggtcgtggatctttcgacgcaaatcttttgccataacgattatccggaaaccattacagactatgtcacactgcaacgaggctcggcttatggcggcgtgttatctaatttttccgggaccgtaaaatatagtggcagtagctatccatttcctaccaccagcgaaacgccgcgcgttgtttataattcgagaacggataagccgtggccggtggcgctttatttgacgcctgtgagcagtgcgggcggggtggcgattaaagctggctcattaattgccgtgcttattttgcgacagaccaacaactataacagcgatgatttccaggtggtgtggaatatttacgccaataatgatgtggtggtgcctactggcggctgcgatgtttctgctcgtgatgtcaccgttactctgccggactaccctggttcagtgccaattcctcttaccgtttattgtgcgaaaagccaaaacctggggtattacctctccggcacaaccgcagatgcgggcaactcgattttcaccaataccgcgtcgttttcacctgcacagggcgtcggcgtacagttgacgcgcaacggtacgattattccagcgaataacacggtatcgttaggagcagtagggacttcggcggtgagtctgggattaacggcaaattatgcacgtaccggagggcaggtgactgcagggaatgtgcaatcgattattggcgtgacttttgtttatcaa

SEQ ID NO: 267 - RNA, 837 nt, synthetic construct
  misc_feature 1..837: note = Escherichia coli J96__ELL41155.1__Ec(J96)-FimH(22-300) CDS opt1
  source 1..837: mol_type = other RNA
ttcgcctgcaagaccgccaacggcaccgcgatccccatcgggggcgggagcgccaacgtgtacgtcaacctggccccggtggtgaacgtcggccagaacctcgtggtggacctgtccacgcagatcttctgccacaacgactaccccgagaccatcaccgactacgtcaccctgcagcgcgggagcgcctacggcggcgtgctctccaacttcagcgggacggtgaagtactccggcagctcctaccccttccccaccaccagcgagaccccgcgggtcgtgtacaactcccgcacggacaagccctggcccgtggccctgtacctgacccccgtcagctccgccgggggcgtggcgatcaaggccgggagcctcatcgccgtgctgatcctgcggcagaccaacaactacaactccgacgacttccagttcgtctggaacatctacgcgaacaacgacgtggtggtcccgaccggcggctgcgacgtgagcgcccgcgacgtgacggtcaccctccccgactaccccgggtccgtgcccatcccgctgaccgtgtactgcgccaagagccagaacctgggctactacctctccgggaccacggccgacgccggcaacagcatcttcaccaacaccgcgtccttcagccccgcccagggcgtcggggtgcagctgacccggaacggcacgatcatccccgccaacaacaccgtcagcctgggggccgtgggcacctccgccgtgagcctcgggctgaccgcgaactacgcccgcacgggcggccaggtcaccgccgggaacgtgcagtccatcatcggcgtgaccttcgtctaccag

SEQ ID NO: 268 - RNA, 837 nt, synthetic construct
  misc_feature 1..837: note = Escherichia coli 536__ABG72591.1__Ec(536)-FimH(22-300) CDS opt1
  source 1..837: mol_type = other RNA
ttcgcctgcaagaccgccaacggcaccgcgatccccatcgggggcgggagcgccaacgtgtacgtcaacctggccccggccgtgaacgtcggccagaacctcgtggtggacctgtccacgcagatcttctgccacaacgactaccccgagaccatcaccgactacgtcaccctgcagcgcgggagcgcctacggcggcgtgctctccagcttcagcgggacggtgaagtacaacggcagctcctaccccttccccaccaccagcgagaccccgcgggtcgtgtacaactcccgcacggacaagccctggcccgtggccctgtacctgacccccgtcagctccgccgggggcgtggcgatcaaggccgggagcctcatcgccgtgctgatcctgcggcagaccaacaactacaactccgacgacttccagttcgtctggaacatctacgcgaacaacgacgtggtggtcccgaccggcggctgcgacgtgagcgcccgcgacgtgacggtcaccctccccgactaccccgggtccgtgcccatcccgctgaccgtgtactgcgccaagagccagaacctgggctactacctctccgggaccacggccgacgccggcaacagcatcttcaccaacaccgcgtccttcagccccgcccagggcgtcggggtgcagctgacccggaacggcacgatcatccccgccaacaacaccgtcagcctgggggccgtgggcacctccgccgtgagcctcgggctgaccgcgaactacgcccgcacgggcggccaggtcaccgccgggaacgtgcagtccatcatcggcgtgaccttcgtctaccag

SEQ ID NO: 269 - RNA, 837 nt, synthetic construct
  misc_feature 1..837: note = Escherichia coli CFT073__AAN83822.1__Ec(CFT073)-FimH(22-300) CDS opt1
  source 1..837: mol_type = other RNA
ttcgcctgcaagaccgccaacggcaccgcgatccccatcgggggcgggagcgccaacgtgtacgtcaacctggccccggccgtgaacgtcggccagaacctcgtggtggacctgtccacgcagatcttctgccacaacgactaccccgagaccatcaccgactacgtcaccctgcagcgcgggagcgcctacggcggcgtgctctccagcttcagcgggacggtgaagtacaacggcagctcctaccccttccccaccaccagcgagaccccgcgggtcgtgtacaactcccgcacggacaagccctggcccgtggccctgtacctgacccccgtcagctccgccgggggcgtggcgatcaaggccgggagcctcatcgccgtgctgatcctgcggcagaccaacaactacaactccgacgacttccagttcgtctggaacatctacgcgaacaacgacgtggtggtcccgaccggcggctgcgacgccagcgcccgcgacgtgacggtcaccctccccgactaccccgggtccgtgcccatcccgctgaccgtgtactgcgccaagagccagaacctgggctactacctctccgggaccacggccgacgccggcaacagcatcttcaccaacaccgcgtccttcagccccgcccagggcgtcggggtgcagctgacccggaacggcacgatcatccccgccaacaacaccgtcagcctgggggccgtgggcacctccgccgtgagcctcgggctgaccgcgaactacgcccgcacgggcggccaggtcaccgccgggaacgtgcagtccatcatcggcgtgaccttcgtctaccag

SEQ ID NO: 270 - RNA, 837 nt, synthetic construct
  misc_feature 1..837: note = Escherichia coli IHE3034__AAC35864.1__Ec(IHE3034)-FimH(22-300) CDS opt1
  source 1..837: mol_type = other RNA
ttcgcctgcaagaccgccaacggcaccgcgatccccatcgggggcgggagcgccaacgtgtacgtcaacctggccccggccgtgaacgtcggccagaacctcgtggtggacctgtccacgcagatcttctgccacaacgactaccccgagaccatcaccgactacgtcaccctgcagcgcggggccgcctacggcggcgtgctctccagcttcagcgggacggtgaagtacaacggcagctcctaccccttccccaccaccagcgagaccccgcgggtcgtgtacaactcccgcacggacaagccctggcccgtggccctgtacctgacccccgtcagctccgccgggggcgtggcgatcaaggccgggagcctcatcgccgtgctgatcctgcggcagaccaacaactacaactccgacgacttccagttcgtctggaacatctacgcgaacaacgacgtggtggtcccgaccggcggctgcgacgtgagcgcccgcgacgtgacggtcaccctccccgactaccccgggtccgtgcccatcccgctgaccgtgtactgcgccaagagccagaacctgggctactacctctccgggaccacggccgacgccggcaacagcatcttcaccaacaccgcgtccttcagccccgcccagggcgtcggggtgcagctgacccggaacggcacgatcatccccgccaacaacaccgtcagcctgggggccgtgggcacctccgccgtgagcctcgggctgaccgcgaactacgcccgcacgggcggccaggtcaccgccgggaacgtgcagtccatcatcggcgtgaccttcgtctaccag

SEQ ID NO: 271 - RNA, 837 nt, synthetic construct
  misc_feature 1..837: note = Escherichia coli NA114__AEG39414.1__Ec(NA114)-FimH(22-300) CDS opt1
  source 1..837: mol_type = other RNA
ttcgcctgcaagaccgccaacggcaccgcgatccccatcgggggcgggagcgccaacgtgtacgtcaacctggccccggccgtgaacgtcggccagaacctcgtggtggacctgtccacgcagatcttctgccacaacgactaccccgagaccatcaccgactacgtcaccctgcagcgcgggagcgcctacggcggcgtgctctccaacttcagcgggacggtgaagtactccggcagctcctaccccttccccaccaccagcgagaccccgcgggtcgtgtacaactcccgcacggacaagccctggcccgtggccctgtacctgacccccgtcagctccgccgggggcgtggcgatcaaggccgggagcctcatcgccgtgctgatcctgcggcagaccaacaactacaactccgacgacttccagttcgtctggaacatctacgcgaacaacgacgtggtggtcccgaccggcggctgcgacgtgagcgcccacgacgtgacggtcaccctccccgactaccccgggtccgtgcccatcccgctgaccgtgtactgcgccaagagccagaacctgggctactacctctccgggaccacggccgacgccggcaacagcatcttcaccaacaccgcgtccttcagccccgcccagggcgtcggggtgcagctgacccggaacggcacgatcatccccgccaacaacaccgtcagcctgggggccgtgggcacctccgccgtgagcctcgggctgaccgcgaactacgcccgcacgggcggccaggtcaccgccgggaacgtgcagtccatcatcggcgtgaccttcgtctaccag

SEQ ID NO: 272 - RNA, 837 nt, synthetic construct
  misc_feature 1..837: note = Escherichia coli F11__WP_000832233.1__Ec(F11)-FimH(22-300) CDS opt1
  source 1..837: mol_type = other RNA
ttcgcctgcaagaccgccaacggcaccgcgatccccatcgggggcgggagcgccaacgtgtacgtcaacctggccccggccgtgaacgtcggccagaacctcgtggtggacctgtccacgcagatcttctgccacaacgactaccccgagaccatcaccgactacgtcaccctgcagcgcgggagcgcctacggcggcgtgctctccagcttcagcgggatcgtgaagtacaacggcagctcctaccccttccccaccaccagcgagaccccgcgggtcgtgtacaactcccgcacggacaagccctggcccgtggccctgtacctgacccccgtcagctccgccgggggcgtggcgatcaaggccgggagcctcatcgccgtgctgatcctgcggcagaccaacaactacaactccgacgacttccagttcgtctggaacatctacgcgaacaacgacgtggtggtcccgaccggcggctgcgacgtgagcgcccgcgacgtgacggtcaccctccccgactaccccgggtccgtgcccatcccgctgaccgtgtactgcgccaagagccagaacctgggctactacctctccgggaccacggccgacgccggcaacagcatcttcaccaacaccgcgtccttcagccccgcccagggcgtcggggtgcagctgacccggaacggcacgatcatccccgccaacaacaccgtcagcctgggggccgtgggcacctccgccgtgagcctcgggctgaccgcgaactacgcccgcacgggcggccaggtcaccgccgggaacgtgcagtccatcatcggcgtgaccttcgtctaccag

SEQ ID NO: 273 - RNA, 837 nt, synthetic construct
  misc_feature 1..837: note = Escherichia coli J96__ELL41155.1__Ec(J96)-FimH(22-300_N28S_N91S_N249Q) CDS opt1
  source 1..837: mol_type = other RNA
ttcgcctgcaagaccgccagcggcaccgcgatccccatcgggggcgggagcgccaacgtgtacgtcaacctggccccggtggtgaacgtcggccagaacctcgtggtggacctgtccacgcagatcttctgccacaacgactaccccgagaccatcaccgactacgtcaccctgcagcgcgggagcgcctacggcggcgtgctctccagcttcagcgggacggtgaagtactccggcagctcctaccccttccccaccaccagcgagaccccgcgggtcgtgtacaactcccgcacggacaagccctggcccgtggccctgtacctgacccccgtcagctccgccgggggcgtggcgatcaaggccgggagcctcatcgccgtgctgatcctgcggcagaccaacaactacaactccgacgacttccagttcgtctggaacatctacgcgaacaacgacgtggtggtcccgaccggcggctgcgacgtgagcgcccgcgacgtgacggtcaccctccccgactaccccgggtccgtgcccatcccgctgaccgtgtactgcgccaagagccagaacctgggctactacctctccgggaccacggccgacgccggcaacagcatcttcaccaacaccgcgtccttcagccccgcccagggcgtcggggtgcagctgacccggcagggcacgatcatccccgccaacaacaccgtcagcctgggggccgtgggcacctccgccgtgagcctcgggctgaccgcgaactacgcccgcacgggcggccaggtcaccgccgggaacgtgcagtccatcatcggcgtgaccttcgtctaccag

SEQ ID NO: 274 - RNA, 837 nt, synthetic construct
  misc_feature 1..837: note = Escherichia coli J96__ELL41155.1__Ec(J96)-FimH(22-300_N28S_N91S_N249Q_N256D) CDS opt1
  source 1..837: mol_type = other RNA
ttcgcctgcaagaccgccagcggcaccgcgatccccatcgggggcgggagcgccaacgtgtacgtcaacctggccccggtggtgaacgtcggccagaacctcgtggtggacctgtccacgcagatcttctgccacaacgactaccccgagaccatcaccgactacgtcaccctgcagcgcgggagcgcctacggcggcgtgctctccagcttcagcgggacggtgaagtactccggcagctcctaccccttccccaccaccagcgagaccccgcgggtcgtgtacaactcccgcacggacaagccctggcccgtggccctgtacctgacccccgtcagctccgccgggggcgtggcgatcaaggccgggagcctcatcgccgtgctgatcctgcggcagaccaacaactacaactccgacgacttccagttcgtctggaacatctacgcgaacaacgacgtggtggtcccgaccggcggctgcgacgtgagcgcccgcgacgtgacggtcaccctccccgactaccccgggtccgtgcccatcccgctgaccgtgtactgcgccaagagccagaacctgggctactacctctccgggaccacggccgacgccggcaacagcatcttcaccaacaccgcgtccttcagccccgcccagggcgtcggggtgcagctgacccggcagggcacgatcatccccgccgacaacaccgtcagcctgggggccgtgggcacctccgccgtgagcctcgggctgaccgcgaactacgcccgcacgggcggccaggtcaccgccgggaacgtgcagtccatcatcggcgtgaccttcgtctaccag

SEQ ID NO: 275 - RNA, 837 nt, synthetic construct
  misc_feature 1..837: note = Escherichia coli J96__ELL41155.1__Ec(J96)-FimH(22-300_N28S_V48C_L55C_N91S_N2 49Q) CDS opt1
  source 1..837: mol_type = other RNA
ttcgcctgcaagaccgccagcggcaccgcgatccccatcgggggcgggagcgccaacgtgtacgtcaacctggccccgtgcgtgaacgtcggccagaactgcgtggtggacctgtccacgcagatcttctgccacaacgactaccccgagaccatcaccgactacgtcaccctgcagcgcgggagcgcctacggcggcgtgctctccagcttcagcgggacggtgaagtactccggcagctcctaccccttccccaccaccagcgagaccccgcgggtcgtgtacaactcccgcacggacaagccctggcccgtggccctgtacctgacccccgtcagctccgccgggggcgtggcgatcaaggccgggagcctcatcgccgtgctgatcctgcggcagaccaacaactacaactccgacgacttccagttcgtctggaacatctacgcgaacaacgacgtggtggtcccgaccggcggctgcgacgtgagcgcccgcgacgtgacggtcaccctccccgactaccccgggtccgtgcccatcccgctgaccgtgtactgcgccaagagccagaacctgggctactacctctccgggaccacggccgacgccggcaacagcatcttcaccaacaccgcgtccttcagccccgcccagggcgtcggggtgcagctgacccggcagggcacgatcatccccgccaacaacaccgtcagcctgggggccgtgggcacctccgccgtgagcctcgggctgaccgcgaactacgcccgcacgggcggccaggtcaccgccgggaacgtgcagtccatcatcggcgtgaccttcgtctaccag

SEQ ID NO: 276 - RNA, 837 nt, synthetic construct
  misc_feature 1..837: note = Escherichia coli J96__ELL41155.1__Ec(J96)-FimH(22-300_F165V) CDS opt1
  source 1..837: mol_type = other RNA
ttcgcctgcaagaccgccaacggcaccgcgatccccatcgggggcgggagcgccaacgtgtacgtcaacctggccccggtggtgaacgtcggccagaacctcgtggtggacctgtccacgcagatcttctgccacaacgactaccccgagaccatcaccgactacgtcaccctgcagcgcgggagcgcctacggcggcgtgctctccaacttcagcgggacggtgaagtactccggcagctcctaccccttccccaccaccagcgagaccccgcgggtcgtgtacaactcccgcacggacaagccctggcccgtggccctgtacctgacccccgtcagctccgccgggggcgtggcgatcaaggccgggagcctcatcgccgtgctgatcctgcggcagaccaacaactacaactccgacgacttccaggtggtctggaacatctacgcgaacaacgacgtggtggtcccgaccggcggctgcgacgtgagcgcccgcgacgtgacggtcaccctccccgactaccccgggtccgtgcccatcccgctgaccgtgtactgcgccaagagccagaacctgggctactacctctccgggaccacggccgacgccggcaacagcatcttcaccaacaccgcgtccttcagccccgcccagggcgtcggggtgcagctgacccggaacggcacgatcatccccgccaacaacaccgtcagcctgggggccgtgggcacctccgccgtgagcctcgggctgaccgcgaactacgcccgcacgggcggccaggtcaccgccgggaacgtgcagtccatcatcggcgtgaccttcgtctaccag

SEQ ID NO: 277 - RNA, 837 nt, synthetic construct; identical to SEQ ID NO: 267
  misc_feature 1..837: note = Escherichia coli J96__ELL41155.1__Ec(J96)-FimH(22-300) CDS opt1
  source 1..837: mol_type = other RNA

SEQ ID NO: 278 - RNA, 837 nt, synthetic construct
  misc_feature 1..837: note = Escherichia coli 536__ABG72591.1__Ec(536)-FimH(22-300) CDS opt1
  source 1..837: mol_type = other RNA
ttcgcctgcaagaccgccaacggcaccgcgatccccatcgggggcgggagcgccaacgtgtacgtcaacctggccccggccgtgaacgtgggccagaacctcgtcgtggacctgtccacgcagatcttctgccacaacgactaccccgagaccatcaccgactacgtgaccctgcagcgcgggagcgcctacggcggcgtcctctccagcttctccgggacggtgaagtacaacggcagctcctaccccttccccaccaccagcgagaccccgcgggtggtctacaactcccgcacggacaagccctggcccgtggcgctgtacctgacccccgtgagctccgccgggggcgtcgccatcaaggccgggagcctcatcgcggtgctgatcctgcggcagaccaacaactacaactccgacgacttccagttcgtgtggaacatctacgccaacaacgacgtcgtggtgccgaccggcggctgcgacgtcagcgcccgcgacgtgacggtgaccctccccgactaccccgggtccgtccccatcccgctgaccgtgtactgcgccaagagccagaacctgggctactacctctccgggaccacggccgacgcgggcaacagcatcttcaccaacaccgcctccttcagccccgcccagggcgtgggggtccagctgacccggaacggcacgatcatccccgccaacaacaccgtgagcctgggggccgtcggcacctccgcggtgagcctcgggctgaccgccaactacgcccgcacgggcggccaggtgaccgccgggaacgtccagtccatcatcggcgtgaccttcgtgtaccag

SEQ ID NO: 279 - RNA, 837 nt, synthetic construct
  misc_feature 1..837: note = Escherichia coli CFT073__AAN83822.1__Ec(CFT073)-FimH(22-300) CDS opt1
  source 1..837: mol_type = other RNA
ttcgcctgcaagaccgccaacggcaccgcgatccccatcgggggcgggagcgccaacgtgtacgtcaacctggccccggccgtgaacgtgggccagaacctcgtcgtggacctgtccacgcagatcttctgccacaacgactaccccgagaccatcaccgactacgtgaccctgcagcgcgggagcgcctacggcggcgtcctctccagcttctccgggacggtgaagtacaacggcagctcctaccccttccccaccaccagcgagaccccgcgggtggtctacaactcccgcacggacaagccctggcccgtggcgctgtacctgacccccgtgagctccgccgggggcgtcgccatcaaggccgggagcctcatcgcggtgctgatcctgcggcagaccaacaactacaactccgacgacttccagttcgtgtggaacatctacgccaacaacgacgtcgtggtgccgaccggcggctgcgacgccagcgcccgcgacgtcacggtgaccctccccgactaccccgggtccgtgcccatcccgctgaccgtctactgcgccaagagccagaacctgggctactacctctccgggaccacggcggacgccggcaacagcatcttcaccaacaccgcctccttcagccccgcccagggcgtgggggtgcagctgacccggaacggcacgatcatccccgccaacaacaccgtcagcctgggggcggtgggcacctccgccgtcagcctcgggctgaccgccaactacgcccgcacgggcggccaggtgaccgccgggaacgtgcagtccatcatcggcgtcaccttcgtgtaccag

SEQ ID NO: 280 - RNA, 837 nt, synthetic construct
  misc_feature 1..837: note = Escherichia coli IHE3034__AAC35864.1__Ec(IHE3034)-FimH(22-300) CDS opt1
  source 1..837: mol_type = other RNA
ttcgcctgcaagaccgccaacggcaccgcgatccccatcgggggcgggagcgccaacgtgtacgtcaacctggccccggccgtgaacgtgggccagaacctcgtcgtggacctgtccacgcagatcttctgccacaacgactaccccgagaccatcaccgactacgtgaccctgcagcgcggggccgcgtacggcggcgtcctcagctccttcagcgggacggtgaagtacaacggctccagctaccccttccccaccacctccgagaccccgcgggtggtctacaacagccgcacggacaagccctggcccgtggccctgtacctgacccccgtgtccagcgccgggggcgtcgccatcaaggcggggtccctcatcgccgtgctgatcctgcggcagaccaacaactacaacagcgacgacttccagttcgtgtggaacatctacgccaacaacgacgtcgtggtgccgaccggcggctgcgacgtctccgcccgcgacgtgacggtgaccctccccgactaccccgggagcgtccccatcccgctgaccgtgtactgcgccaagtcccagaacctgggctactacctcagcgggaccacggcggacgccggcaactccatcttcaccaacaccgccagcttctcccccgcccagggcgtgggggtccagctgacccggaacggcacgatcatccccgccaacaacaccgtgagcctgggggcggtcggcaccagcgccgtgtccctcgggctgaccgccaactacgcccgcacgggcggccaggtgaccgccgggaacgtccagagcatcatcggcgtgaccttcgtgtaccag

SEQ ID NO: 281 - RNA, 837 nt, synthetic construct
  misc_feature 1..837: note = Escherichia coli NA114__AEG39414.1__Ec(NA114)-FimH(22-300) CDS opt1
  source 1..837: mol_type = other RNA
ttcgcctgcaagaccgccaacggcaccgcgatccccatcgggggcgggagcgccaacgtgtacgtcaacctggccccggccgtgaacgtgggccagaacctcgtcgtggacctgtccacgcagatcttctgccacaacgactaccccgagaccatcaccgactacgtgaccctgcagcgcgggagcgcctacggcggcgtcctctccaacttcagcgggacggtgaagtactccggcagctcctaccccttccccaccaccagcgagaccccgcgggtggtctacaactcccgcacggacaagccctggcccgtggcgctgtacctgacccccgtgagctccgccgggggcgtcgccatcaaggccgggagcctcatcgcggtgctgatcctgcggcagaccaacaactacaactccgacgacttccagttcgtgtggaacatctacgccaacaacgacgtcgtggtgccgaccggcggctgcgacgtcagcgcccacgacgtgacggtgaccctccccgactaccccgggtccgtccccatcccgctgaccgtgtactgcgccaagagccagaacctgggctactacctctccgggaccacggccgacgcgggcaacagcatcttcaccaacaccgcctccttcagccccgcccagggcgtgggggtccagctgacccgcaacggcacgatcatccccgccaacaacaccgtgagcctgggggccgtcggcacctccgcggtgagcctcgggctgaccgccaactacgcccggacgggcggccaggtgaccgccgggaacgtccagtccatcatcggcgtgaccttcgtgtaccag

SEQ ID NO: 282 - RNA, 837 nt, synthetic construct
  misc_feature 1..837: note = Escherichia coli F11__WP_000832233.1__Ec(F11)-FimH(22-300) CDS opt1
  source 1..837: mol_type = other RNA
ttcgcctgcaagaccgccaacggcaccgcgatccccatcgggggcgggagcgccaacgtgtacgtcaacctggccccggccgtgaacgtgggccagaacctcgtcgtggacctgtccacgcagatcttctgccacaacgactaccccgagaccatcaccgactacgtgaccctgcagcgcgggagcgcctacggcggcgtcctctccagcttctccgggatcgtgaagtacaacggcagctcctaccccttccccacgaccagcgagaccccgcgggtggtctacaactcccgcaccgacaagccctggcccgtggcgctgtacctgacgcccgtgagctccgccgggggcgtcgccatcaaggccgggagcctcatcgcggtgctgatcctgcggcagaccaacaactacaactccgacgacttccagttcgtgtggaacatctacgccaacaacgacgtcgtggtgccgaccggcggctgcgacgtcagcgcccgcgacgtgaccgtgacgctccccgactaccccgggtccgtccccatcccgctgaccgtgtactgcgccaagagccagaacctgggctactacctctccgggaccaccgccgacgcgggcaacagcatcttcacgaacaccgcctccttcagccccgcccagggcgtgggggtccagctgacccggaacggcaccatcatccccgccaacaacacggtgagcctgggggccgtcggcacctccgcggtgagcctcgggctgaccgccaactacgcccgcaccggcggccaggtgacggccgggaacgtccagtccatcatcggcgtgaccttcgtgtaccag

SEQ ID NO: 283 - RNA, 837 nt, synthetic construct
  misc_feature 1..837: note = Escherichia coli J96__ELL41155.1__Ec(J96)-FimH(22-300_N28S_N91S_N249Q) CDS opt1
  source 1..837: mol_type = other RNA
ttcgcctgcaagaccgccagcggcaccgcgatccccatcgggggcgggtccgccaacgtgtacgtcaacctggccccggtggtgaacgtcggccagaacctcgtggtggacctgagcacgcagatcttctgccacaacgactaccccgagaccatcaccgactacgtcaccctgcagcgcgggtccgcctacggcggcgtgctcagctccttcagcgggacggtgaagtactccggcagctcctaccccttccccaccaccagcgagaccccgcgggtcgtgtacaactcccgcacggacaagccctggcccgtggccctgtacctgacccccgtcagctccgccgggggcgtggcgatcaaggccgggagcctcatcgccgtgctgatcctgcggcagaccaacaactacaactccgacgacttccagttcgtctggaacatctacgcgaacaacgacgtggtggtcccgaccggcggctgcgacgtgagcgcccgcgacgtgacggtcaccctccccgactaccccgggtccgtgcccatcccgctgaccgtgtactgcgccaagagccagaacctgggctactacctctccgggaccacggccgacgccggcaacagcatcttcaccaacaccgcgagcttctcccccgcccagggcgtcggggtgcagctgacccggcagggcacgatcatccccgccaacaacaccgtcagcctgggggccgtgggcacctccgccgtgagcctcgggctgaccgcgaactacgcccgcacgggcggccaggtcaccgccgggaacgtgcagtccatcatcggcgtgaccttcgtctaccag

SEQ ID NO: 284 - RNA, 837 nt, synthetic construct
  misc_feature 1..837: note = Escherichia coli J96__ELL41155.1__Ec(J96)-FimH(22-300_N28S_N91S_N249Q_N256D) CDS opt1
  source 1..837: mol_type = other RNA
ttcgcctgcaagaccgccagcggcaccgcgatccccatcgggggcgggtccgccaacgtgtacgtcaacctggccccggtggtgaacgtcggccagaacctcgtggtggacctgagcacgcagatcttctgccacaacgactaccccgagaccatcaccgactacgtcaccctgcagcgcgggtccgcctacggcggcgtgctcagctccttcagcgggacggtgaagtactccggcagctcctaccccttccccaccaccagcgagaccccgcgggtcgtgtacaactcccgcacggacaagccctggcccgtggccctgtacctgacccccgtcagctccgccgggggcgtggcgatcaaggccgggagcctcatcgccgtgctgatcctgcggcagaccaacaactacaactccgacgacttccagttcgtctggaacatctacgcgaacaacgacgtggtggtcccgaccggcggctgcgacgtgagcgcccgcgacgtgacggtcaccctccccgactaccccgggtccgtgcccatcccgctgaccgtgtactgcgccaagagccagaacctgggctactacctctccgggaccacggccgacgccggcaacagcatcttcaccaacaccgcgagcttctcccccgcccagggcgtcggggtgcagctgacccggcagggcacgatcatccccgccgacaacaccgtcagcctgggggccgtgggcacctccgccgtgagcctcgggctgaccgcgaactacgcccgcacgggcggccaggtcaccgccgggaacgtgcagtccatcatcggcgtgaccttcgtctaccag

SEQ ID NO: 285 - RNA, 837 nt, synthetic construct
  misc_feature 1..837: note = Escherichia coli J96__ELL41155.1__Ec(J96)-FimH(22-300_N28S_V48C_L55C_N91S_N2 49Q) CDS opt1
  source 1..837: mol_type = other RNA
ttcgcctgcaagaccgccagcggcaccgcgatccccatcgggggcgggtccgccaacgtgtacgtcaacctggccccgtgcgtgaacgtgggccagaactgcgtcgtggacctcagcacgcagatcttctgccacaacgactaccccgagaccatcaccgactacgtgaccctgcagcgcgggtccgcctacggcggcgtcctgagctccttcagcgggacggtgaagtactccggcagctcctaccccttccccaccaccagcgagaccccgcgggtggtctacaactcccgcacggacaagccctggcccgtggccctctacctgacccccgtgagctccgccgggggcgtcgcgatcaaggccgggagcctgatcgccgtgctcatcctgcggcagaccaacaactacaactccgacgacttccagttcgtgtggaacatctacgcgaacaacgacgtcgtggtgccgaccggcggctgcgacgtcagcgcccgcgacgtgacggtgaccctgcccgactaccccgggtccgtccccatcccgctcaccgtgtactgcgccaagagccagaacctgggctactacctgtccgggaccacggccgacgccggcaacagcatcttcaccaacaccgcgagcttctcccccgcccagggcgtgggggtccagctcacccggcagggcacgatcatccccgccaacaacaccgtgagcctgggggccgtcggcacctccgccgtgagcctggggctcaccgcgaactacgcccgcacgggcggccaggtgaccgccgggaacgtccagtccatcatcggcgtgaccttcgtgtaccag

SEQ ID NO: 286 - RNA, 837 nt, synthetic construct
  misc_feature 1..837: note = Escherichia coli J96__ELL41155.1__Ec(J96)-FimH(22-300_F165V) CDS opt1
  source 1..837: mol_type = other RNA
ttcgcctgcaagaccgccaacggcaccgcgatccccatcgggggcgggagcgccaacgtgtacgtcaacctggccccggtggtgaacgtcggccagaacctcgtggtggacctgtccacgcagatcttctgccacaacgactaccccgagaccatcaccgactacgtcaccctgcagcgcgggagcgcctacggcggcgtgctctccaacttcagcgggacggtgaagtactccggcagctcctaccccttccccaccaccagcgagaccccgcgggtcgtgtacaactcccgcacggacaagccctggcccgtggccctgtacctgacccccgtcagctccgccgggggcgtggcgatcaaggccgggagcctcatcgccgtgctgatcctgcggcagaccaacaactacaactccgacgacttccaggtcgtgtggaacatctacgcgaacaacgacgtggtcgtgccgaccggcggctgcgacgtgagcgcccgcgacgtcacggtgaccctccccgactaccccgggtccgtgcccatcccgctgaccgtctactgcgccaagagccagaacctgggctactacctctccgggaccacggccgacgccggcaacagcatcttcaccaacaccgcgtccttcagccccgcccagggcgtgggggtccagctgacccggaacggcacgatcatccccgccaacaacaccgtgagcctgggggccgtgggcacctccgccgtcagcctcgggctgaccgcgaactacgcccgcacgggcggccaggtgaccgccgggaacgtgcagtccatcatcggcgtcaccttcgtgtaccag

SEQ ID NO: 287 - RNA, 837 nt, synthetic construct
  misc_feature 1..837: note = Escherichia coli J96__ELL41155.1__Ec(J96)-FimH(22-300) CDS opt3
  source 1..837: mol_type = other RNA
ttcgcctgcaagaccgctaacggcacagcaatccccattgggggaggtagcgccaatgtgtacgtcaacctggcgcctgttgtgaatgtaggccagaacctcgtggtcgacctttccactcaaatattttgtcacaatgattatccagagacgatcaccgactacgtgacactgcagagagggtctgcttatggaggcgttttgtcaaacttcagtggtactgtgaaatacagcgggtcctcttatccgtttcccaccacatcggaaacccctagggtcgtgtacaattcacggactgataagccatggcccgtagccttatatctgacacctgttagcagtgcaggaggcgtggccattaaagctggctccctaatcgcagtcctcattctgcgccagaccaacaattacaactctgacgatttccagtttgtgtggaatatctacgccaacaatgacgtggtcgttccaactgggggatgcgatgtgagcgctcgagacgtaacggtgacccttcccgattatcctggttccgtcccaataccgctgacagtgtactgtgccaagtcacaaaacttgggctattacctcagtgggactaccgcggacgcaggaaatagcatcttcacaaacaccgcctctttttcccccgctcagggcgttggtgtgcagctgacgcgtaacgggactattatccctgccaataacacagtctcactgggagcagtgggcaccagcgctgtaagtctcggcttaactgccaattatgcgagaacagggggacaggttaccgccggtaacgtgcaatctattatcggcgtcacgttcgtgtaccag

SEQ ID NO: 288 - RNA, 837 nt, synthetic construct
  misc_feature 1..837: note = Escherichia coli 536__ABG72591.1__Ec(536)-FimH(22-300) CDS opt3
  source 1..837: mol_type = other RNA
ttcgcctgcaagaccgctaacggcacagcaatccccattgggggaggtagcgccaatgtgtacgtcaacctggcgcctgctgttaatgtgggccagaacctcgtagtggacctttccactcaaatattttgtcacaatgattatccagagacgatcaccgactacgtcacactgcagagagggtctgcctatggaggcgtgttgtcaagtttcagcggtactgttaaatacaacgggtcctcttatccgtttcccaccacatcggaaacccctagggtggtctacaattcacggactgataagccatggcccgtggcattatatctgacacctgtaagcagtgccggaggcgttgctattaaagcaggctccctaatcgccgtgctcattctgcgccagaccaacaattacaactctgacgatttccagtttgtctggaatatctacgctaacaatgacgtggtggtcccaactgggggatgcgatgttagcgcccgagacgtgacggtaacccttcccgattatcctggttccgtgccaataccgctgacagtctactgtgcgaagtcacaaaacttgggctattacctcagtgggactaccgcagacgccggaaatagcatcttcacaaacaccgcttctttttcccccgcccagggcgtgggtgttcagctgacgcgtaacgggactattatccctgcaaataacacagtgtcactgggagctgtcggcaccagcgccgtgagtctcggcttaactgcgaattatgccagaacagggggacaggtaaccgcaggtaacgttcaatctattatcggcgtgacgttcgtctaccag

SEQ ID NO: 289 - RNA, 837 nt, synthetic construct
  misc_feature 1..837: note = Escherichia coli CFT073__AAN83822.1__Ec(CFT073)-FimH(22-300) CDS opt3
  source 1..837: mol_type = other RNA
ttcgcctgcaagaccgctaacggcacagcaatccccattgggggaggtagcgccaatgtgtacgtcaacctggcgcctgctgttaatgtgggccagaacctcgtagtggacctttccactcaaatattttgtcacaatgattatccagagacgatcaccgactacgtcacactgcagagagggtctgcctatggaggcgtgttgtcaagtttcagcggtactgttaaatacaacgggtcctcttatccgtttcccaccacatcggaaacccctagggtggtctacaattcacggactgataagccatggcccgtggcattatatctgacacctgtaagcagtgccggaggcgttgctattaaagcaggctccctaatcgccgtgctcattctgcgccagaccaacaattacaactctgacgatttccagtttgtctggaatatctacgctaacaatgacgtggtggtcccaactgggggatgcgatgccagcgcgcgagacgttacggtgacccttcccgattatcctggttccgtaccaataccgctgacagtgtactgtgcaaagtcacaaaacttgggctattacctcagtgggactaccgccgacgctggaaatagcatcttcacaaacaccgcctctttttcccccgcacagggcgtcggtgtgcagctgacgcgtaacgggactattatccctgctaataacacagtttcactgggagccgtgggcaccagcgcggtcagtctcggcttaactgccaattatgcaagaacagggggacaggtgaccgctggtaacgtacaatctattatcggcgttacgttcgtgtaccag

SEQ ID NO: 290 - RNA, 837 nt, synthetic construct
  misc_feature 1..837: note = Escherichia coli IHE3034__AAC35864.1__Ec(IHE3034)-FimH(22-300) CDS opt3
  source 1..837: mol_type = other RNA
ttcgcctgcaagaccgctaacggcacagcaatccccattgggggaggtagcgccaatgtgtacgtcaacctggcgcctgctgttaatgtgggccagaacctcgtagtggacctttccactcaaatattttgtcacaatgattatccagagacgatcaccgactacgtcacactgcagagaggggccgcatatggaggcgtgttgtcttcattcagtggtactgttaaatacaacgggagctcctatccgtttcccaccacatctgaaacccctagggtggtctacaattcgcggactgataagccatggcccgtggccttatatctgacacctgtatcaagcgctggaggcgttgcaattaaagccggcagtctaatcgctgtgctcattctgcgccagaccaacaattacaactccgacgatttccagtttgtctggaatatctacgccaacaatgacgtggtggtcccaactgggggatgcgatgtttctgcgcgagacgtgacggtaacccttcccgattatcctggtagcgtgccaataccgctgacagtctactgtgcaaagtcccaaaacttgggctattacctctcagggactaccgccgacgctggaaatagtatcttcacaaacaccgccagcttttctcccgcacagggcgtgggtgttcagctgacgcgtaacgggactattatccctgctaataacacagtgtccctgggagccgtcggcacctcagcggtgagcctcggcttaactgccaattatgcaagaacagggggacaggtaaccgctggtaacgttcaaagtattatcggcgtgacgttcgtctaccag

SEQ ID NO: 291 - RNA, 837 nt, synthetic construct
  misc_feature 1..837: note = Escherichia coli NA114__AEG39414.1__Ec(NA114)-FimH(22-300) CDS opt3
  source 1..837: mol_type = other RNA
ttcgcctgcaagaccgctaacggcacagcaatccccattgggggaggtagcgccaatgtgtacgtcaacctggcgcctgctgttaatgtgggccagaacctcgtagtggacctttccactcaaatattttgtcacaatgattatccagagacgatcaccgactacgtcacactgcagagagggtctgcctatggaggcgtgttgtcaaacttcagtggtactgttaaatacagcgggtcctcttatccgtttcccaccacatcggaaacccctagggtggtctacaattcacggactgataagccatggcccgtggcattatatctgacacctgtaagcagtgccggaggcgttgctattaaagcaggctccctaatcgccgtgctcattctgcgccagaccaacaattacaactctgacgatttccagtttgtctggaatatctacgctaacaatgacgtggtggtcccaactgggggatgcgatgttagcgcccatgacgtgacggtaacccttcccgattatcctggttccgtgccaataccgctgacagtctactgtgcgaagtcacaaaacttgggctattacctcagtgggactaccgcagacgccggaaatagcatcttcacaaacaccgcttctttttcccccgcccagggcgtgggtgttcagctgacgcgaaacgggactattatccctgcaaataacacagtgtcactgggagctgtcggcaccagcgccgtgagtctcggcttaactgcgaattatgcccgtacagggggacaggtaaccgcaggtaacgttcaatctattatcggcgtgacgttcgtctaccag

SEQ ID NO: 292 - RNA, 837 nt, synthetic construct
  misc_feature 1..837: note = Escherichia coli F11__WP_000832233.1__Ec(F11)-FimH(22-300) CDS opt3
  source 1..837: mol_type = other RNA
ttcgcctgcaagaccgctaacggcacagcaatccccattgggggaggtagcgccaatgtgtacgtcaacctggcgcctgctgttaatgtgggccagaacctcgtagtggacctttccactcaaatattttgtcacaatgattatccagagacgatcaccgactacgtcacactgcagagagggtctgcctatggaggcgtgttgtcaagtttcagcggtattgttaaatacaacgggtcctcttatccgtttcccactacctcggaaacacctagggtggtctacaattcacggaccgataagccatggcccgtggcattatatctgactcctgtaagcagtgccggaggcgttgctatcaaagcaggctccctaattgccgtgctcatcctgcgccagacaaacaattacaactctgacgatttccagtttgtctggaatatatacgctaacaatgacgtggtggtcccaaccgggggatgcgatgttagcgcccgagacgtgacggtaactcttcccgattatcctggttccgtgccaatcccgctgaccgtctactgtgcgaagtcacaaaacttgggctattacctcagtgggacaactgcagacgccggaaatagcattttcaccaacacagcttctttttcccccgcccagggcgtgggtgttcagctgacccgtaacgggacgatcattcctgcaaataacactgtgtcactgggagctgtcggcacaagcgccgtgagtctcggcttaaccgcgaattatgccagaactgggggacaggtaacagcaggtaacgttcaatctatcataggcgtgaccttcgtctaccag

SEQ ID NO: 293 - RNA, 837 nt, synthetic construct
  misc_feature 1..837: note = Escherichia coli J96__ELL41155.1__Ec(J96)-FimH(22-300_N28S_N91S_N249Q) CDS opt3
  source 1..837: mol_type = other RNA
ttcgcctgcaagaccgctagcggcacagcaatccccattgggggaggttccgccaacgtgtacgtcaatctggcgcctgttgtgaacgtaggccagaatctcgtggtcgacctttctactcaaatattttgtcacaacgattatccagagacgatcaccgactacgtgacactgcagagagggtcagcttatggaggcgttttgagtagcttctccggtactgtgaaatactctgggtcgtcatatccgtttcccaccacaagcgaaacccctagggtcgtgtacaatagtcggactgataagccatggcccgtagccttatatctgacacctgtttcctctgcaggaggcgtggccattaaagctggcagcctaatcgcagtcctcattctgcgccagaccaacaattacaactccgacgatttccagtttgtgtggaatatctacgccaacaatgacgtggtcgttccaactgggggatgcgatgtgtcagctcgagacgtaacggtgacccttcccgattatcctggtagtgtcccaataccgctgacagtgtactgtgccaagagccaaaacttgggctattacctctctgggactaccgcggacgcaggaaattccatcttcacaaacaccgcctcatttagccccgctcagggcgttggtgtgcagctgacgcgtcaggggactattatccctgccaataacacagtcagtctgggagcagtgggcacctctgctgtatccctcggcttaactgccaactatgcgagaacagggggacaagttaccgccggtaatgtgcagagcattatcggcgtcacgttcgtgtaccag

SEQ ID NO: 294 - RNA, 837 nt, synthetic construct
  misc_feature 1..837: note = Escherichia coli J96__ELL41155.1__Ec(J96)-FimH(22-300_N28S_N91S_N249Q_N256D) CDS opt3
  source 1..837: mol_type = other RNA
ttcgcctgcaagaccgctagcggcacagcaatccccattgggggaggttccgccaacgtgtacgtcaatctggcgcctgttgtgaacgtaggccagaatctcgtggtcgacctttctactcaaatattttgtcacaacgattatccagagacgatcaccgactacgtgacactgcagagagggtcagcttatggaggcgttttgagtagcttctccggtactgtgaaatactctgggtcgtcatatccgtttcccaccacaagcgaaacccctagggtcgtgtacaatagtcggactgataagccatggcccgtagccttatatctgacacctgtttcctctgcaggaggcgtggccattaaagctggcagcctaatcgcagtcctcattctgcgccagaccaacaattacaactccgacgatttccagtttgtgtggaatatctacgccaacaatgacgtggtcgttccaactgggggatgcgatgtgtcagctcgagacgtaacggtgacccttcccgattatcctggtagtgtcccaataccgctgacagtgtactgtgccaagagccaaaacttgggctattacctctctgggactaccgcggacgcaggaaattccatcttcacaaacaccgcctcatttagccccgctcagggcgttggtgtgcagctgacgcgtcaggggactattatccctgccgataatacagtcagtctgggagcagtgggcacctctgctgtatccctcggcttaactgccaactatgcgagaacagggggacaagttaccgccggtaacgtgcagagcattatcggcgtcacgttcgtgtaccag

SEQ ID NO: 295 - RNA, 837 nt, synthetic construct
  misc_feature 1..837: note = Escherichia coli J96__ELL41155.1__Ec(J96)-FimH(22-300_N28S_V48C_L55C_N91S_N2 49Q) CDS opt3
  source 1..837: mol_type = other RNA
ttcgcctgcaagaccgctagcggcacagcaatccccattgggggaggttccgccaacgtgtacgtcaatctggcgccttgtgttaacgtgggccagaattgcgtagtggacctctctactcaaatattttgtcacaacgattatccagagacgatcaccgactacgtcacacttcagagagggtcagcttatggaggcgtgctgagtagcttctccggtactgttaaatactctgggtcgtcatatccgtttcccaccacaagcgaaacccctagggtggtctacaatagtcggactgataagccatggcccgtggccttgtatttaacacctgtatcctctgcaggaggcgttgccattaaagctggcagcctgatcgcagtgctaattctccgccagaccaacaattacaactccgacgatttccagtttgtctggaatatctacgccaacaatgacgtggtggtcccaactgggggatgcgatgtttcagctcgagacgtgacggtaaccctgcccgattatcctggtagtgtgccaataccgcttacagtctactgtgccaagagccaaaacctgggctattacttgtctgggactaccgcggacgcaggaaattccatcttcacaaacaccgcctcatttagccccgctcagggcgtgggtgttcagctcacgcgtcaggggactattatccctgccaataacacagtgagtctgggagcagtcggcacctctgctgtgtccctgggcctcactgccaactatgcgagaacagggggacaagtaaccgccggtaatgttcagagcattatcggcgtgacgttcgtctaccag

SEQ ID NO: 296 - RNA, 837 nt, synthetic construct
  misc_feature 1..837: note = Escherichia coli J96__ELL41155.1__Ec(J96)-FimH(22-300_F165V) CDS opt3
  source 1..837: mol_type = other RNA
ttcgcctgcaagaccgctaacggcacagcaatccccattgggggaggtagcgccaatgtgtacgtcaacctggcgcctgttgtgaatgtaggccagaacctcgtggtcgacctttccactcaaatattttgtcacaatgattatccagagacgatcaccgactacgtgacactgcagagagggtctgcttatggaggcgttttgtcaaacttcagtggtactgtgaaatacagcgggtcctcttatccgtttcccaccacatcggaaacccctagggtcgtgtacaattcacggactgataagccatggcccgtagccttatatctgacacctgttagcagtgcaggaggcgtggccattaaagctggctccctaatcgcagtcctcattctgcgccagaccaacaattacaactctgacgatttccaggtggtgtggaatatctacgccaacaatgacgtcgttgtgccaactgggggatgcgatgtaagcgctcgagacgtgacggtcacccttcccgattatcctggttccgtgccaataccgctgacagtttactgtgccaagtcacaaaacttgggctattacctcagtgggactaccgcggacgcaggaaatagcatctttacaaacaccgcctctttctcccccgctcagggcgtgggtgtccagctgacgcgtaacgggactattatccctgccaataacacagtgtcactgggagcagtaggcaccagcgctgttagtctcggcttaactgccaattatgcgagaacagggggacaggtgaccgccggtaacgtccaatctattatcggcgtgacgtttgtctaccag

SEQ ID NO: 297 - RNA, 837 nt, synthetic construct
  misc_feature 1..837: note = Escherichia coli J96__ELL41155.1__Ec(J96)-FimH(22-300) CDS opt4
  source 1..837: mol_type = other RNA
ttcgcctgcaagaccgccaacggcaccgccatccccatcggcggcggcagcgccaacgtgtacgtgaacctggcccccgtggtgaacgtgggccagaacctggtggtggacctgagcacccagatcttctgccacaacgactaccccgagaccatcaccgactacgtgaccctgcagagaggcagcgcctacggcggcgtgctgagcaacttcagcggcaccgtgaagtacagcggcagcagctaccccttccccaccaccagcgagacccccagagtggtgtacaacagcagaaccgacaagccctggcccgtggccctgtacctgacccccgtgagcagcgccggcggcgtggccatcaaggccggcagcctgatcgccgtgctgatcctgagacagaccaacaactacaacagcgacgacttccagttcgtgtggaacatctacgccaacaacgacgtggtggtgcccaccggcggctgcgacgtgagcgccagagacgtgaccgtgaccctgcccgactaccccggcagcgtgcccatccccctgaccgtgtactgcgccaagagccagaacctgggctactacctgagcggcaccaccgccgacgccggcaacagcatcttcaccaacaccgccagcttcagccccgcccagggcgtgggcgtgcagctgaccagaaacggcaccatcatccccgccaacaacaccgtgagcctgggcgccgtgggcaccagcgccgtgagcctgggcctgaccgccaactacgccagaaccggcggccaggtgaccgccggcaacgtgcagagcatcatcggcgtgaccttcgtgtaccag

SEQ ID NO: 298 - RNA, 837 nt, synthetic construct
  misc_feature 1..837: note = Escherichia coli 536__ABG72591.1__Ec(536)-FimH(22-300) CDS opt4
  source 1..837: mol_type = other RNA
ttcgcctgcaagaccgccaacggcaccgccatccccatcggcggcggcagcgccaacgtgtacgtgaacctggcccccgccgtgaacgtgggccagaacctggtggtggacctgagcacccagatcttctgccacaacgactaccccgagaccatcaccgactacgtgaccctgcagagaggcagcgcctacggcggcgtgctgagcagcttcagcggcaccgtgaagtacaacggcagcagctaccccttccccaccaccagcgagacccccagagtggtgtacaacagcagaaccgacaagccctggcccgtggccctgtacctgacccccgtgagcagcgccggcggcgtggccatcaaggccggcagcctgatcgccgtgctgatcctgagacagaccaacaactacaacagcgacgacttccagttcgtgtggaacatctacgccaacaacgacgtggtggtgcccaccggcggctgcgacgtgagcgccagagacgtgaccgtgaccctgcccgactaccccggcagcgtgcccatccccctgaccgtgtactgcgccaagagccagaacctgggctactacctgagcggcaccaccgccgacgccggcaacagcatcttcaccaacaccgccagcttcagccccgcccagggcgtgggcgtgcagctgaccagaaacggcaccatcatccccgccaacaacaccgtgagcctgggcgccgtgggcaccagcgccgtgagcctgggcctgaccgccaactacgccagaaccggcggccaggtgaccgccggcaacgtgcagagcatcatcggcgtgaccttcgtgtaccag

SEQ ID NO: 299 - RNA, 837 nt, synthetic construct
  misc_feature 1..837: note = Escherichia coli CFT073__AAN83822.1__Ec(CFT073)-FimH(22-300) CDS opt4
  source 1..837: mol_type = other RNA
ttcgcctgcaagaccgccaacggcaccgccatccccatcggcggcggcagcgccaacgtgtacgtgaacctggcccccgccgtgaacgtgggccagaacctggtggtggacctgagcacccagatcttctgccacaacgactaccccgagaccatcaccgactacgtgaccctgcagagaggcagcgcctacggcggcgtgctgagcagcttcagcggcaccgtgaagtacaacggcagcagctaccccttccccaccaccagcgagacccccagagtggtgtacaacagcagaaccgacaagccctggcccgtggccctgtacctgacccccgtgagcagcgccggcggcgtggccatcaaggccggcagcctgatcgccgtgctgatcctgagacagaccaacaactacaacagcgacgacttccagttcgtgtggaacatctacgccaacaacgacgtggtggtgcccaccggcggctgcgacgccagcgccagagacgtgaccgtgaccctgcccgactaccccggcagcgtgcccatccccctgaccgtgtactgcgccaagagccagaacctgggctactacctgagcggcaccaccgccgacgccggcaacagcatcttcaccaacaccgccagcttcagccccgcccagggcgtgggcgtgcagctgaccagaaacggcaccatcatccccgccaacaacaccgtgagcctgggcgccgtgggcaccagcgccgtgagcctgggcctgaccgccaactacgccagaaccggcggccaggtgaccgccggcaacgtgcagagcatcatcggcgtgaccttcgtgtaccag

SEQ ID NO: 300 - RNA, 837 nt, synthetic construct
  misc_feature 1..837: note = Escherichia coli IHE3034__AAC35864.1__Ec(IHE3034)-FimH(22-300) CDS opt4
  source 1..837: mol_type = other RNA
ttcgcctgcaagaccgccaacggcaccgccatccccatcggcggcggcagcgccaacgtgtacgtgaacctggcccccgccgtgaacgtgggccagaacctggtggtggacctgagcacccagatcttctgccacaacgactaccccgagaccatcaccgactacgtgaccctgcagagaggcgccgcctacggcggcgtgctgagcagcttcagcggcaccgtgaagtacaacggcagcagctaccccttccccaccaccagcgagacccccagagtggtgtacaacagcagaaccgacaagccctggcccgtggccctgtacctgacccccgtgagcagcgccggcggcgtggccatcaaggccggcagcctgatcgccgtgctgatcctgagacagaccaacaactacaacagcgacgacttccagttcgtgtggaacatctacgccaacaacgacgtggtggtgcccaccggcggctgcgacgtgagcgccagagacgtgaccgtgaccctgcccgactaccccggcagcgtgcccatccccctgaccgtgtactgcgccaagagccagaacctgggctactacctgagcggcaccaccgccgacgccggcaacagcatcttcaccaacaccgccagcttcagccccgcccagggcgtgggcgtgcagctgaccagaaacggcaccatcatccccgccaacaacaccgtgagcctgggcgccgtgggcaccagcgccgtgagcctgggcctgaccgccaactacgccagaaccggcggccaggtgaccgccggcaacgtgcagagcatcatcggcgtgaccttcgtgtaccag

SEQ ID NO: 301 - RNA, 837 nt, synthetic construct
  misc_feature 1..837: note = Escherichia coli NA114__AEG39414.1__Ec(NA114)-FimH(22-300) CDS opt4
  source 1..837: mol_type = other RNA
ttcgcctgcaagaccgccaacggcaccgccatccccatcggcggcggcagcgccaacgtgtacgtgaacctggcccccgccgtgaacgtgggccagaacctggtggtggacctgagcacccagatcttctgccacaacgactaccccgagaccatcaccgactacgtgaccctgcagagaggcagcgcctacggcggcgtgctgagcaacttcagcggcaccgtgaagtacagcggcagcagctaccccttccccaccaccagcgagacccccagagtggtgtacaacagcagaaccgacaagccctggcccgtggccctgtacctgacccccgtgagcagcgccggcggcgtggccatcaaggccggcagcctgatcgccgtgctgatcctgagacagaccaacaactacaacagcgacgacttccagttcgtgtggaacatctacgccaacaacgacgtggtggtgcccaccggcggctgcgacgtgagcgcccacgacgtgaccgtgaccctgcccgactaccccggcagcgtgcccatccccctgaccgtgtactgcgccaagagccagaacctgggctactacctgagcggcaccaccgccgacgccggcaacagcatcttcaccaacaccgccagcttcagccccgcccagggcgtgggcgtgcagctgaccagaaacggcaccatcatccccgccaacaacaccgtgagcctgggcgccgtgggcaccagcgccgtgagcctgggcctgaccgccaactacgccagaaccggcggccaggtgaccgccggcaacgtgcagagcatcatcggcgtgaccttcgtgtaccag

SEQ ID NO: 302 - RNA, 837 nt, synthetic construct
  misc_feature 1..837: note = Escherichia coli F11__WP_000832233.1__Ec(F11)-FimH(22-300) CDS opt4
  source 1..837: mol_type = other RNA
ttcgcctgcaagaccgccaacggcaccgccatccccatcggcggcggcagcgccaacgtgtacgtgaacctggcccccgccgtgaacgtgggccagaacctggtggtggacctgagcacccagatcttctgccacaacgactaccccgagaccatcaccgactacgtgaccctgcagagaggcagcgcctacggcggcgtgctgagcagcttcagcggcatcgtgaagtacaacggcagcagctaccccttccccaccaccagcgagacccccagagtggtgtacaacagcagaaccgacaagccctggcccgtggccctgtacctgacccccgtgagcagcgccggcggcgtggccatcaaggccggcagcctgatcgccgtgctgatcctgagacagaccaacaactacaacagcgacgacttccagttcgtgtggaacatctacgccaacaacgacgtggtggtgcccaccggcggctgcgacgtgagcgccagagacgtgaccgtgaccctgcccgactaccccggcagcgtgcccatccccctgaccgtgtactgcgccaagagccagaacctgggctactacctgagcggcaccaccgccgacgccggcaacagcatcttcaccaacaccgccagcttcagccccgcccagggcgtgggcgtgcagctgaccagaaacggcaccatcatccccgccaacaacaccgtgagcctgggcgccgtgggcaccagcgccgtgagcctgggcctgaccgccaactacgccagaaccggcggccaggtgaccgccggcaacgtgcagagcatcatcggcgtgaccttcgtgtaccag

SEQ ID NO: 303 - RNA, 837 nt, synthetic construct
  misc_feature 1..837: note = Escherichia coli J96__ELL41155.1__Ec(J96)-FimH(22-300_N28S_N91S_N249Q) CDS opt4
  source 1..837: mol_type = other RNA
ttcgcctgcaagaccgccagcggcaccgccatccccatcggcggcggcagcgccaacgtgtacgtgaacctggcccccgtggtgaacgtgggccagaacctggtggtggacctgagcacccagatcttctgccacaacgactaccccgagaccatcaccgactacgtgaccctgcagagaggcagcgcctacggcggcgtgctgagcagcttcagcggcaccgtgaagtacagcggcagcagctaccccttccccaccaccagcgagacccccagagtggtgtacaacagcagaaccgacaagccctggcccgtggccctgtacctgacccccgtgagcagcgccggcggcgtggccatcaaggccggcagcctgatcgccgtgctgatcctgagacagaccaacaactacaacagcgacgacttccagttcgtgtggaacatctacgccaacaacgacgtggtggtgcccaccggcggctgcgacgtgagcgccagagacgtgaccgtgaccctgcccgactaccccggcagcgtgcccatccccctgaccgtgtactgcgccaagagccagaacctgggctactacctgagcggcaccaccgccgacgccggcaacagcatcttcaccaacaccgccagcttcagccccgcccagggcgtgggcgtgcagctgaccagacagggcaccatcatccccgccaacaacaccgtgagcctgggcgccgtgggcaccagcgccgtgagcctgggcctgaccgccaactacgccagaaccggcggccaggtgaccgccggcaacgtgcagagcatcatcggcgtgaccttcgtgtaccag

SEQ ID NO: 304 - RNA, 837 nt, synthetic construct
  misc_feature 1..837: note = Escherichia coli J96__ELL41155.1__Ec(J96)-FimH(22-300_N28S_N91S_N249Q_N256D) CDS opt4
  source 1..837: mol_type = other RNA
ttcgcctgcaagaccgccagcggcaccgccatccccatcggcggcggcagcgccaacgtgtacgtgaacctggcccccgtggtgaacgtgggccagaacctggtggtggacctgagcacccagatcttctgccacaacgactaccccgagaccatcaccgactacgtgaccctgcagagaggcagcgcctacggcggcgtgctgagcagcttcagcggcaccgtgaagtacagcggcagcagctaccccttccccaccaccagcgagacccccagagtggtgtacaacagcagaaccgacaagccctggcccgtggccctgtacctgacccccgtgagcagcgccggcggcgtggccatcaaggccggcagcctgatcgccgtgctgatcctgagacagaccaacaactacaacagcgacgacttccagttcgtgtggaacatctacgccaacaacgacgtggtggtgcccaccggcggctgcgacgtgagcgccagagacgtgaccgtgaccctgcccgactaccccggcagcgtgcccatccccctgaccgtgtactgcgccaagagccagaacctgggctactacctgagcggcaccaccgccgacgccggcaacagcatcttcaccaacaccgccagcttcagccccgcccagggcgtgggcgtgcagctgaccagacagggcaccatcatccccgccgacaacaccgtgagcctgggcgccgtgggcaccagcgccgtgagcctgggcctgaccgccaactacgccagaaccggcggccaggtgaccgccggcaacgtgcagagcatcatcggcgtgaccttcgtgtaccag

SEQ ID NO: 305 - RNA, 837 nt, synthetic construct
  misc_feature 1..837: note = Escherichia coli J96__ELL41155.1__Ec(J96)-FimH(22-300_N28S_V48C_L55C_N91S_N2 49Q) CDS opt4
  source 1..837: mol_type = other RNA
ttcgcctgcaagaccgccagcggcaccgccatccccatcggcggcggcagcgccaacgtgtacgtgaacctggccccctgcgtgaacgtgggccagaactgcgtggtggacctgagcacccagatcttctgccacaacgactaccccgagaccatcaccgactacgtgaccctgcagagaggcagcgcctacggcggcgtgctgagcagcttcagcggcaccgtgaagtacagcggcagcagctaccccttccccaccaccagcgagacccccagagtggtgtacaacagcagaaccgacaagccctggcccgtggccctgtacctgacccccgtgagcagcgccggcggcgtggccatcaaggccggcagcctgatcgccgtgctgatcctgagacagaccaacaactacaacagcgacgacttccagttcgtgtggaacatctacgccaacaacgacgtggtggtgcccaccggcggctgcgacgtgagcgccagagacgtgaccgtgaccctgcccgactaccccggcagcgtgcccatccccctgaccgtgtactgcgccaagagccagaacctgggctactacctgagcggcaccaccgccgacgccggcaacagcatcttcaccaacaccgccagcttcagccccgcccagggcgtgggcgtgcagctgaccagacagggcaccatcatccccgccaacaacaccgtgagcctgggcgccgtgggcaccagcgccgtgagcctgggcctgaccgccaactacgccagaaccggcggccaggtgaccgccggcaacgtgcagagcatcatcggcgtgaccttcgtgtaccag

SEQ ID NO: 306 - RNA, 837 nt, synthetic construct
  misc_feature 1..837: note = Escherichia coli J96__ELL41155.1__Ec(J96)-FimH(22-300_F165V) CDS opt4
  source 1..837: mol_type = other RNA
ttcgcctgcaagaccgccaacggcaccgccatccccatcggcggcggcagcgccaacgtgtacgtgaacctggcccccgtggtgaacgtgggccagaacctggtggtggacctgagcacccagatcttctgccacaacgactaccccgagaccatcaccgactacgtgaccctgcagagaggcagcgcctacggcggcgtgctgagcaacttcagcggcaccgtgaagtacagcggcagcagctaccccttccccaccaccagcgagacccccagagtggtgtacaacagcagaaccgacaagccctggcccgtggccctgtacctgacccccgtgagcagcgccggcggcgtggccatcaaggccggcagcctgatcgccgtgctgatcctgagacagaccaacaactacaacagcgacgacttccaggtggtgtggaacatctacgccaacaacgacgtggtggtgcccaccggcggctgcgacgtgagcgccagagacgtgaccgtgaccctgcccgactaccccggcagcgtgcccatccccctgaccgtgtactgcgccaagagccagaacctgggctactacctgagcggcaccaccgccgacgccggcaacagcatcttcaccaacaccgccagcttcagccccgcccagggcgtgggcgtgcagctgaccagaaacggcaccatcatccccgccaacaacaccgtgagcctgggcgccgtgggcaccagcgccgtgagcctgggcctgaccgccaactacgccagaaccggcggccaggtgaccgccggcaacgtgcagagcatcatcggcgtgaccttcgtgtaccag

SEQ ID NO: 307 - RNA, 837 nt, synthetic construct
  misc_feature 1..837: note = Escherichia coli J96__ELL41155.1__Ec(J96)-FimH(22-300) CDS opt5
  source 1..837: mol_type = other RNA
ttcgcctgcaagaccgctaacggcacagccatccccattgggggaggcagcgcgaatgtgtacgtcaacctggctcctgttgtgaatgtggggcagaacctcgtcgtggacctgtccacgcaaatcttttgtcacaatgattatccggagaccattacagactacgttacccttcagagaggatctgcctatggcggggtgctgagcaacttctccggaacagtcaaatactctggcagctcctatccctttcctaccacatctgaaacgccccgggtggtttacaatagccgcaccgataagccttggcccgtggccctctatctgacccctgtctccagcgctggcggggtggccatcaaagctggatctcttattgccgtgctgatcctcagacagacaaacaattacaactccgacgatttccagtttgtctggaatatctacgcgaacaatgacgttgtggtgccgaccggcgggtgcgatgtcagcgcccgggacgtgacagttaccctgcccgattatcctggatctgtgcccattcctctgacggtctactgtgctaagtcccaaaacctcggctattacctgagcgggacaaccgccgacgctggaaattctatcttcacaaacaccgcctcctttagccccgcgcagggcgtgggcgttcagcttacccgcaacgggacaattatcccggccaataacacggtgtccctgggagctgtcggcacctctgccgtgagcctcgggctgacagctaattatgccagaaccggaggccaggtcacagccgggaacgtgcaatccattatcggagttaccttcgtgtaccag

SEQ ID NO: 308 - RNA, 837 nt, synthetic construct
  misc_feature 1..837: note = Escherichia coli 536__ABG72591.1__Ec(536)-FimH(22-300) CDS opt5
  source 1..837: mol_type = other RNA
ttcgcctgcaagaccgctaacggcacagccatccccattgggggaggcagcgcgaatgtgtacgtcaacctggctcctgccgttaatgtggggcagaacctcgtggtcgacctgtccacgcaaatcttttgtcacaatgattatccggagaccattacagactacgtgacccttcagagaggatctgcctatggcggggttctgagctccttctctggaacagtgaaatacaacggcagctcctatccctttcctaccacatctgaaacgccccgggtcgtgtacaatagccgcaccgataagccttggcccgttgctctctatctgacccctgtgtccagcgccggcggggtcgctatcaaagccggatctcttattgcggtgctgatcctcagacagacaaacaattacaactccgacgatttccagtttgtgtggaatatctacgccaacaatgacgtcgttgtgccgaccggcgggtgcgatgtgagcgctcgggacgtcacagtgaccctgcccgattatcctggatctgttcccattcctctgacggtgtactgtgccaagtcccaaaacctcggctattacctgagcgggacaaccgctgacgccggaaattctatcttcacaaacaccgcgtcctttagccccgcccagggcgtcggcgtgcagcttacccgcaacgggacaattatcccggctaataacacggtttccctgggagccgtgggcacctctgctgtcagcctcgggctgacagccaattatgccagaaccggaggccaggtgacagctgggaacgtccaatccattatcggagtgaccttcgtttaccag

SEQ ID NO: 309 - RNA, 837 nt, synthetic construct
  misc_feature 1..837: note = Escherichia coli CFT073__AAN83822.1__Ec(CFT073)-FimH(22-300) CDS opt5
  source 1..837: mol_type = other RNA
ttcgcctgcaagaccgctaacggcacagccatccccattgggggaggcagcgcgaatgtgtacgtcaacctggctcctgccgttaatgtggggcagaacctcgtggtcgacctgtccacgcaaatcttttgtcacaatgattatccggagaccattacagactacgtgacccttcagagaggatctgcctatggcggggttctgagctccttctctggaacagtgaaatacaacggcagctcctatccctttcctaccacatctgaaacgccccgggtcgtgtacaatagccgcaccgataagccttggcccgttgctctctatctgacccctgtgtccagcgccggcggggtcgctatcaaagccggatctcttattgcggtgctgatcctcagacagacaaacaattacaactccgacgatttccagtttgtgtggaatatctacgccaacaatgacgtcgttgtgccgaccggcgggtgcgatgctagcgcccgggacgtgacagtcaccctgcccgattatcctggatctgtgcccattcctctgacggtttactgtgctaagtcccaaaacctcggctattacctgagcgggacaaccgccgacgcgggaaattctatcttcacaaacaccgcctcctttagccccgctcagggcgtgggcgtccagcttacccgcaacgggacaattatcccggccaataacacggtgtccctgggagctgttggcacctctgccgtgagcctcgggctgacagccaattatgctagaaccggaggccaggtcacagcggggaacgtgcaatccattatcggagtcaccttcgtgtaccag

SEQ ID NO: 310 - RNA, 837 nt, synthetic construct
  misc_feature 1..837: note = Escherichia coli IHE3034__AAC35864.1__Ec(IHE3034)-FimH(22-300) CDS opt5
  source 1..837: mol_type = other RNA
ttcgcctgcaagaccgctaacggcacagccatccccattgggggaggcagcgcgaatgtgtacgtcaacctggctcctgccgttaatgtggggcagaacctcgtggtcgacctgtccacgcaaatcttttgtcacaatgattatccggagaccattacagactacgtgacccttcagagaggagccgcttatggcggggttctgtctagcttctccggaacagtgaaatacaacggctctagctatccctttcctaccacatccgaaacgccccgggtcgtgtacaattctcgcaccgataagccttggcccgttgccctctatctgacccctgtgagctccgctggcggggtcgccatcaaagcgggaagccttattgccgtgctgatcctcagacagacaaacaattacaactctgacgatttccagtttgtgtggaatatctacgctaacaatgacgtcgttgtgccgaccggcgggtgcgatgtgtccgcccgggacgtcacagtgaccctgcccgattatcctggaagcgttcccattcctctgacggtgtactgtgctaagtctcaaaacctcggctattacctgtccgggacaaccgccgacgcgggaaatagcatcttcacaaacaccgcctctttttcccccgctcagggcgtcggcgtgcagcttacccgcaacgggacaattatcccggccaataacacggttagcctgggagctgtgggcacctccgccgtctctctcgggctgacagccaattatgctagaaccggaggccaggtgacagcggggaacgtccaaagcattatcggagtgaccttcgtttaccag

SEQ ID NO: 311 - RNA, 837 nt, synthetic construct
  misc_feature 1..837: note = Escherichia coli NA114__AEG39414.1__Ec(NA114)-FimH(22-300) CDS opt5
  source 1..837: mol_type = other RNA
ttcgcctgcaagaccgctaacggcacagccatccccattgggggaggcagcgcgaatgtgtacgtcaacctggctcctgccgttaatgtggggcagaacctcgtggtcgacctgtccacgcaaatcttttgtcacaatgattatccggagaccattacagactacgtgacccttcagagaggatctgcctatggcggggttctgagcaacttctccggaacagtgaaatactctggcagctcctatccctttcctaccacatctgaaacgccccgggtcgtgtacaatagccgcaccgataagccttggcccgttgctctctatctgacccctgtgtccagcgccggcggggtcgctatcaaagccggatctcttattgcggtgctgatcctcagacagacaaacaattacaactccgacgatttccagtttgtgtggaatatctacgccaacaatgacgtcgttgtgccgaccggcgggtgcgatgtgagcgctcatgacgtcacagtgaccctgcccgattatcctggatctgttcccattcctctgacggtgtactgtgccaagtcccaaaacctcggctattacctgagcgggacaaccgctgacgccggaaattctatcttcacaaacaccgcgtcctttagccccgcccagggcgtcggcgtgcagcttacccggaacgggacaattatcccggctaataacacggtttccctgggagccgtgggcacctctgctgtcagcctcgggctgacagccaattatgcccgcaccggaggccaggtgacagctgggaacgtccaatccattatcggagtgaccttcgtttaccag

SEQ ID NO: 312 - RNA, 837 nt, synthetic construct
  misc_feature 1..837: note = Escherichia coli F11__WP_000832233.1__Ec(F11)-FimH(22-300) CDS opt5
  source 1..837: mol_type = other RNA
ttcgcctgcaagaccgctaacggcacagccatccccattgggggaggcagcgcgaatgtgtacgtcaacctggctcctgccgttaatgtggggcagaacctcgtggtcgacctgtccacgcaaatcttttgtcacaatgattatccggagaccattacagactacgtgacccttcagagaggatctgcctatggcggggttctgagctccttctctggaatcgtgaaatacaacggcagctcctatccctttcctacaacctctgaaacaccccgggtcgtgtacaatagccgcaccgataagccttggcccgttgctctctatctgacgcctgtgtccagcgccggcggggtcgctattaaagccggatctcttatcgcggtgctgatcctcagacagaccaacaattacaactccgacgatttccagtttgtgtggaatatttacgccaacaatgacgtcgttgtgccgacaggcgggtgcgatgtgagcgctcgggacgtcaccgtgacactgcccgattatcctggatctgttcccatccctctgaccgtgtactgtgccaagtcccaaaacctcggctattacctgagcgggacgacagctgacgccggaaattctattttcaccaacacagcgtcctttagccccgcccagggcgtcggcgtgcagcttacccgcaacgggaccatcattccggctaataacacagtttccctgggagccgtgggcacgtctgctgtcagcctcgggctgaccgccaattatgccagaacaggaggccaggtgaccgctgggaacgtccaatccatcattggagtgacattcgtttaccag

SEQ ID NO: 313 - RNA, 837 nt, synthetic construct
  misc_feature 1..837: note = Escherichia coli J96__ELL41155.1__Ec(J96)-FimH(22-300_N28S_N91S_N249Q) CDS opt5
  source 1..837: mol_type = other RNA
ttcgcctgcaagaccgctagcggcacagccatccccattgggggaggctccgcgaacgtgtacgtcaatctggctcctgttgtgaacgtggggcagaatctcgtcgtggacctgtctacgcaaatcttttgtcacaacgattatccggagaccattacagactacgttacccttcagagaggaagcgcctatggcggggtgctgtcctctttcagcggaacagtcaaatactccggctctagctatccctttcctaccacatccgaaacgccccgggtggtttacaatagccgcaccgataagccttggcccgtggccctctatctgacccctgtctcttccgctggcggggtggccatcaaagctggaagccttattgccgtgctgatcctcagacagacaaacaattacaactctgacgatttccagtttgtctggaatatctacgcgaacaatgacgttgtggtgccgaccggcgggtgcgatgtctccgcccgggacgtgacagttaccctgcccgattatcctggaagcgtgcccattcctctgacggtctactgtgctaagtctcaaaacctcggctattacctgtccgggacaaccgccgacgctggaaatagcatcttcacaaacaccgcctccttttctcccgcgcagggcgtgggcgttcagcttacccgccaggggacaattatcccggccaataacacggtgagcctgggagctgtcggcacctccgccgtgagcctcgggctgacagctaactatgccagaaccggaggccaagtcacagccgggaatgtgcagtctattatcggagttaccttcgtgtaccag

SEQ ID NO: 314 - RNA, 837 nt, synthetic construct
  misc_feature 1..837: note = Escherichia coli J96__ELL41155.1__Ec(J96)-FimH(22-300_N28S_N91S_N249Q_N256D) CDS opt5
  source 1..837: mol_type = other RNA
ttcgcctgcaagaccgctagcggcacagccatccccattgggggaggctccgcgaacgtgtacgtcaatctggctcctgttgtgaacgtggggcagaatctcgtcgtggacctgtctacgcaaatcttttgtcacaacgattatccggagaccattacagactacgttacccttcagagaggaagcgcctatggcggggtgctgtcctctttcagcggaacagtcaaatactccggctctagctatccctttcctaccacatccgaaacgccccgggtggtttacaatagccgcaccgataagccttggcccgtggccctctatctgacccctgtctcttccgctggcggggtggccatcaaagctggaagccttattgccgtgctgatcctcagacagacaaacaattacaactctgacgatttccagtttgtctggaatatctacgcgaacaatgacgttgtggtgccgaccggcgggtgcgatgtctccgcccgggacgtgacagttaccctgcccgattatcctggaagcgtgcccattcctctgacggtctactgtgctaagtctcaaaacctcggctattacctgtccgggacaaccgccgacgctggaaatagcatcttcacaaacaccgcctccttttctcccgcgcagggcgtgggcgttcagcttacccgccaggggacaattatcccggccgataatacggtgagcctgggagctgtcggcacctccgccgtgagcctcgggctgacagctaactatgccagaaccggaggccaagtcacagccgggaacgtgcagtctattatcggagttaccttcgtgtaccag

SEQ ID NO: 315 - RNA, 837 nt, synthetic construct
  misc_feature 1..837: note = Escherichia coli J96__ELL41155.1__Ec(J96)-FimH(22-300_N28S_V48C_L55C_N91S_N2 49Q) CDS opt5
  source 1..837: mol_type = other RNA
ttcgcctgcaagaccgctagcggcacagccatccccattgggggaggctccgcgaacgtgtacgtcaatctggctccttgtgttaacgtggggcagaattgcgtggtcgacctctctacgcaaatcttttgtcacaacgattatccggagaccattacagactacgtgaccctgcagagaggaagcgcctatggcggggttctttcctctttcagcggaacagtgaaatactccggctctagctatccctttcctaccacatccgaaacgccccgggtcgtgtacaatagccgcaccgataagccttggcccgttgccctgtatctcacccctgtgtcttccgctggcggggtcgccatcaaagctggaagcctgattgccgtgcttatcctgagacagacaaacaattacaactctgacgatttccagtttgtgtggaatatctacgcgaacaatgacgtcgttgtgccgaccggcgggtgcgatgtgtccgcccgggacgtcacagtgaccctccccgattatcctggaagcgttcccattcctctgacggtgtactgtgctaagtctcaaaacctgggctattacctctccgggacaaccgccgacgctggaaatagcatcttcacaaacaccgcctccttttctcccgcgcagggcgtcggcgtgcagctgacccgccaggggacaattatcccggccaataacacggttagccttggagctgtgggcacctccgccgtcagcctggggctcacagctaactatgccagaaccggaggccaagtgacagccgggaatgtccagtctattatcggagtgaccttcgtttaccag

SEQ ID NO: 316 - RNA, 837 nt, synthetic construct
  misc_feature 1..837: note = Escherichia coli J96__ELL41155.1__Ec(J96)-FimH(22-300_F165V) CDS opt5
  source 1..837: mol_type = other RNA
ttcgcctgcaagaccgctaacggcacagccatccccattgggggaggcagcgcgaatgtgtacgtcaacctggctcctgttgtgaatgtggggcagaacctcgtcgtggacctgtccacgcaaatcttttgtcacaatgattatccggagaccattacagactacgttacccttcagagaggatctgcctatggcggggtgctgagcaacttctccggaacagtcaaatactctggcagctcctatccctttcctaccacatctgaaacgccccgggtggtttacaatagccgcaccgataagccttggcccgtggccctctatctgacccctgtctccagcgctggcggggtggccatcaaagctggatctcttattgccgtgctgatcctcagacagacaaacaattacaactccgacgatttccaggtcgtttggaatatctacgcgaacaatgacgtggtggtcccgaccggcgggtgcgatgtgagcgcccgggacgttacagtgaccctgcccgattatcctggatctgtccccattcctctgacggtgtactgtgctaagtcccaaaacctcggctattacctgagcgggacaaccgccgacgctggaaattctatctttacaaacaccgcctccttcagccccgcgcagggcgttggcgtgcagcttacccgcaacgggacaattatcccggccaataacacggtctccctgggagctgtgggcacctctgccgtcagcctcgggctgacagctaattatgccagaaccggaggccaggtgacagccgggaacgttcaatccattatcggagtgacctttgtctaccag

SEQ ID NO: 317 - protein, 241 aa, Escherichia coli
  REGION 1..241: note = Escherichia coli J96__ELL41151.1__Ec(J96)-FimC protein
MSNKNVNVRKSQEITFCLLAGILMFMAMMVAGRAEAGVALGATRVIYPAGQKQVQLAVTNNDENSTYLIQSWVENADGVKDGRFIVTPPLFAMKGKKENTLRILDATNNQLPQDRESLFWMNVKAIPSMDKSKLTENTLQLAIISRIKLYYRPAKLALPPDQAAEKLRFRRSANSLTLINPTPYYLTVTELNAGTRVLENALVPPMGESTVKLPSDAGSNITYRTINDYGALTPKMTGVME

SEQ ID NO: 318 - RNA, 726 nt, Escherichia coli
  misc_feature 1..726: note = Escherichia coli J96__ELL41151.1__Ec(J96)-FimC CDS wt
  source 1..726: mol_type = mRNA
atgagtaataaaaacgtcaatgtaaggaaatcgcaggaaataacattctgcttgctggcaggtatcctgatgttcatggcaatgatggttgccggacgcgctgaagcgggagtggccttaggtgcgactcgcgtaatttatccggcagggcaaaaacaagtgcaacttgccgtgacaaataatgatgaaaatagtacctatttaattcaatcatgggtggaaaatgccgatggtgtaaaggatggtcgttttatcgtgacgcctcctctgtttgcgatgaagggaaaaaaagagaataccttacgtattcttgatgcaacaaataaccaattgccacaggaccgggaaagtttattctggatgaacgttaaagcgattccgtcaatggataaatcaaaattgactgagaatacgctacagctcgcaattatcagccgcattaaactgtactatcgcccggctaaattagcgttgccacccgatcaggccgcagaaaaattaagatttcgtcgtagcgcgaattctctgacgctgattaacccgacaccctattacctgacggtaacagagttgaatgccggaacccgggttcttgaaaatgcattggtgcctccaatgggcgaaagcacggttaaattgccttctgatgcaggaagcaatattacttaccgaacaataaatgattatggcgcacttacccccaaaatgacgggcgtaatggaataa

SEQ ID NO: 319 - RNA, 726 nt, synthetic construct
  misc_feature 1..726: note = Escherichia coli J96__ELL41151.1__Ec(J96)-FimC CDS opt1
  source 1..726: mol_type = other RNA
atgagcaacaagaacgtgaacgtccgcaagtcccaggagatcaccttctgcctgctcgccggcatcctgatgttcatggccatgatggtggcggggcgggccgaggccggcgtggccctgggggccacccgcgtcatctaccccgcgggccagaagcaggtccagctcgccgtgaccaacaacgacgagaacagcacgtacctgatccagtcctgggtggagaacgccgacggggtgaaggacggccggttcatcgtgaccccgcccctgttcgccatgaaggggaagaaggagaacaccctccgcatcctggacgccaccaacaaccagctgccccaggaccgggagagcctcttctggatgaacgtcaaggcgatcccctccatggacaagagcaagctgacggagaacaccctgcagctcgccatcatctcccgcatcaagctgtactaccggccggccaagctggccctcccgcccgaccaggcggccgagaagctgcgcttccggcgcagcgccaactccctgaccctcatcaaccccaccccctactacctgacggtgaccgagctgaacgccggcacccgggtgctcgagaacgccctggtcccgcccatgggcgagagcaccgtgaagctgccctccgacgcggggagcaacatcacgtaccgcaccatcaacgactacggcgccctcacccccaagatgaccggggtgatggagtga

SEQ ID NO: 320 - RNA, 726 nt, synthetic construct
  misc_feature 1..726: note = Escherichia coli J96__ELL41151.1__Ec(J96)-FimC CDS opt1
  source 1..726: mol_type = other RNA
atgagcaacaagaacgtgaacgtccgcaagtcccaggagatcaccttctgcctgctcgccggcatcctgatgttcatggccatgatggtggcggggcgggccgaggccggcgtggccctgggggccacccgcgtcatctaccccgcgggccagaagcaggtccagctcgccgtgacgaacaacgacgagaacagcacctacctgatccagtcctgggtggagaacgccgacggggtgaaggacggccggttcatcgtgaccccgcccctgttcgccatgaagggcaagaaggagaacaccctccgcatcctggacgcgacgaacaaccagctgccccaggaccgggagagcctcttctggatgaacgtcaaggccatcccctccatggacaagagcaagctgaccgagaacaccctgcagctcgccatcatctcccgcatcaagctgtactaccggccggccaagctggccctcccgcccgaccaggcggccgagaagctgcgcttccggcgcagcgccaactccctgaccctcatcaaccccacgccctactacctgaccgtgaccgagctgaacgccgggacccgggtgctcgagaacgccctggtcccgcccatgggcgagagcacggtgaagctgccctccgacgcggggagcaacatcacctaccgcaccatcaacgactacggcgccctcacccccaagatgacgggggtgatggagtga

SEQ ID NO: 321 - RNA, 726 nt, synthetic construct
  misc_feature 1..726: note = Escherichia coli J96__ELL41151.1__Ec(J96)-FimC CDS opt3
  source 1..726: mol_type = other RNA
atgagcaacaagaatgtgaacgtcagaaaatcccaggagatcaccttctgcctgctcgccggcattcttatgtttatggctatgatggttgcagggagggccgaagcgggagtggctctgggtgccacacgggtaatataccccgcaggccaaaaacaggtgcagttggccgtcactaataacgacgaaaattctacgtatttaatccagtcatgggtggagaacgctgatggggttaaggacggacgcttcattgtgacccctccactgtttgcaatgaagggcaaaaaggagaatacactacgaatcctcgatgccactaacaatcaactgccgcaggaccgtgaaagtcttttctggatgaacgtcaaggctattcccagcatggataaatccaagctgaccgagaatacattgcagctcgccatcatatctagaatcaaactgtactataggcctgcgaagctggcactcccacccgaccaggccgctgagaaattacggtttcgcagatcggccaactcactgacccttattaatcctactccatactatttgacagtgaccgaactgaacgcaggtacgagggtactagagaatgctctcgttccccctatgggggaaagcactgtgaagctgccaagtgatgccggatccaacatcacctaccggacaattaacgactatggcgcgcttactccgaagatgaccggcgtcatggagtga

SEQ ID NO: 322 - RNA, 726 nt, synthetic construct
  misc_feature 1..726: note = Escherichia coli J96__ELL41151.1__Ec(J96)-FimC CDS opt4
  source 1..726: mol_type = other RNA
atgagcaacaagaacgtgaacgtgagaaagagccaggagatcaccttctgcctgctggccggcatcctgatgttcatggccatgatggtggccggcagagccgaggccggcgtggccctgggcgccaccagagtgatctaccccgccggccagaagcaggtgcagctggccgtgaccaacaacgacgagaacagcacctacctgatccagagctgggtggagaacgccgacggcgtgaaggacggcagattcatcgtgaccccccccctgttcgccatgaagggcaagaaggagaacaccctgagaatcctggacgccaccaacaaccagctgccccaggacagagagagcctgttctggatgaacgtgaaggccatccccagcatggacaagagcaagctgaccgagaacaccctgcagctggccatcatcagcagaatcaagctgtactacagacccgccaagctggccctgccccccgaccaggccgccgagaagctgagattcagaagaagcgccaacagcctgaccctgatcaaccccaccccctactacctgaccgtgaccgagctgaacgccggcaccagagtgctggagaacgccctggtgccccccatgggcgagagcaccgtgaagctgcccagcgacgccggcagcaacatcacctacagaaccatcaacgactacggcgccctgacccccaagatgaccggcgtgatggagtga

SEQ ID NO: 323 - RNA, 726 nt, synthetic construct
  misc_feature 1..726: note = Escherichia coli J96__ELL41151.1__Ec(J96)-FimC CDS opt5
  source 1..726: mol_type = other RNA
atgagcaacaagaatgtgaacgtcagaaaatcccaggagatcaccttctgcctgctcgccggcattctgatgtttatggctatgatggttgccgggcgggcggaagctggagtggcccttggcgccacacgcgtgatctaccccgctgggcaaaagcaggtccagctggccgtgacgaataacgacgaaaattctacctatctcattcagagctgggttgagaacgctgatggagtgaaagacggcagattcatcgtcacacctccgctgtttgccatgaaggggaaaaaggagaatacccttcggattctggatgcgacaaacaatcaactcccccaggaccgcgaatccctgttctggatgaacgtgaaggccatcccttctatggataaaagcaagctgaccgagaatacactccagctggctatcatttccagaatcaaactttactatcggcccgccaagctggctctccctcccgaccaggccgcggagaaactgcgctttagacggtctgccaacagccttaccctgattaatcctacgccgtactatctcaccgttacagaactgaacgctggaacccgcgtgctggagaatgccctcgtgccccctatgggcgaatccacagtcaagctgcccagcgatgctggctctaacatcacctacagaacgattaacgactatggggcccttacacctaagatgaccggagtgatggagtga

SEQ ID NO: 324 - protein, 205 aa, Escherichia coli
  REGION 1..205: note = Escherichia coli J96__ELL41151.1__Ec(J96)-FimC(37-241) protein
GVALGATRVIYPAGQKQVQLAVTNNDENSTYLIQSWVENADGVKDGRFIVTPPLFAMKGKKENTLRILDATNNQLPQDRESLFWMNVKAIPSMDKSKLTENTLQLAIISRIKLYYRPAKLALPPDQAAEKLRFRRSANSLTLINPTPYYLTVTELNAGTRVLENALVPPMGESTVKLPSDAGSNITYRTINDYGALTPKMTGVME

SEQ ID NO: 325 - RNA, 615 nt, Escherichia coli
  misc_feature 1..615: note = Escherichia coli J96__ELL41151.1__Ec(J96)-FimC(37-241) CDS wt
  source 1..615: mol_type = mRNA
ggagtggccttaggtgcgactcgcgtaatttatccggcagggcaaaaacaagtgcaacttgccgtgacaaataatgatgaaaatagtacctatttaattcaatcatgggtggaaaatgccgatggtgtaaaggatggtcgttttatcgtgacgcctcctctgtttgcgatgaagggaaaaaaagagaataccttacgtattcttgatgcaacaaataaccaattgccacaggaccgggaaagtttattctggatgaacgttaaagcgattccgtcaatggataaatcaaaattgactgagaatacgctacagctcgcaattatcagccgcattaaactgtactatcgcccggctaaattagcgttgccacccgatcaggccgcagaaaaattaagatttcgtcgtagcgcgaattctctgacgctgattaacccgacaccctattacctgacggtaacagagttgaatgccggaacccgggttcttgaaaatgcattggtgcctccaatgggcgaaagcacggttaaattgccttctgatgcaggaagcaatattacttaccgaacaataaatgattatggcgcacttacccccaaaatgacgggcgtaatggaa

SEQ ID NO: 326 - RNA, 615 nt, synthetic construct
  misc_feature 1..615: note = Escherichia coli J96__ELL41151.1__Ec(J96)-FimC(37-241) CDS opt1
  source 1..615: mol_type = other RNA
ggcgtggccctgggggccacccgcgtcatctaccccgcgggccagaagcaggtccagctcgccgtgaccaacaacgacgagaacagcacgtacctgatccagtcctgggtggagaacgccgacggggtgaaggacggccggttcatcgtgaccccgcccctgttcgccatgaaggggaagaaggagaacaccctccgcatcctggacgccaccaacaaccagctgccccaggaccgggagagcctcttctggatgaacgtcaaggcgatcccctccatggacaagagcaagctgacggagaacaccctgcagctcgccatcatctcccgcatcaagctgtactaccggccggccaagctggccctcccgcccgaccaggcggccgagaagctgcgcttccggcgcagcgccaactccctgaccctcatcaaccccaccccctactacctgacggtgaccgagctgaacgccggcacccgggtgctcgagaacgccctggtcccgcccatgggcgagagcaccgtgaagctgccctccgacgcggggagcaacatcacgtaccgcaccatcaacgactacggcgccctcacccccaagatgaccggggtgatggag

SEQ ID NO: 327 - RNA, 615 nt, synthetic construct; identical to SEQ ID NO: 326
  misc_feature 1..615: note = Escherichia coli J96__ELL41151.1__Ec(J96)-FimC(37-241) CDS opt1
  source 1..615: mol_type = other RNA

SEQ ID NO: 328 - RNA, 615 nt, synthetic construct
  misc_feature 1..615: note = Escherichia coli J96__ELL41151.1__Ec(J96)-FimC(37-241) CDS opt3
  source 1..615: mol_type = other RNA
ggcgtggccctgggggctaccagagtcatctaccccgcaggacagaagcaagttcagctcgccgtgacaaacaatgacgagaacagcacttatcttattcagtcctgggtagaaaatgcggatggtgtgaaagacggcaggttcatagtcacgcctccactgtttgctatgaaggggaaaaaggagaacaccttgcggatcttagatgccacaaataaccagctgccgcaagaccgcgaatctctattctggatgaatgtgaaagcaattccctcaatggataagagtaagctcactgagaacaccctgcagcttgccatcattagccgaatcaaactgtactatcgtcctgctaagttggcactcccacccgaccaggccgctgaaaaactgagatttaggcggtccgccaattctctgacactcataaaccctaccccatactatttaactgttacagagctgaatgcgggaacccgcgtgcttgagaacgcattggtgccccctatgggcgaatcgacggtcaagctgccatcagatgccggtagcaatatcacttacagaaccattaacgactatggggctctaacaccgaaaatgactggagtaatggag

SEQ ID NO: 329 - RNA, 615 nt, synthetic construct
  misc_feature 1..615: note = Escherichia coli J96__ELL41151.1__Ec(J96)-FimC(37-241) CDS opt4
  source 1..615: mol_type = other RNA
ggcgtggccctgggcgccaccagagtgatctaccccgccggccagaagcaggtgcagctggccgtgaccaacaacgacgagaacagcacctacctgatccagagctgggtggagaacgccgacggcgtgaaggacggcagattcatcgtgaccccccccctgttcgccatgaagggcaagaaggagaacaccctgagaatcctggacgccaccaacaaccagctgccccaggacagagagagcctgttctggatgaacgtgaaggccatccccagcatggacaagagcaagctgaccgagaacaccctgcagctggccatcatcagcagaatcaagctgtactacagacccgccaagctggccctgccccccgaccaggccgccgagaagctgagattcagaagaagcgccaacagcctgaccctgatcaaccccaccccctactacctgaccgtgaccgagctgaacgccggcaccagagtgctggagaacgccctggtgccccccatgggcgagagcaccgtgaagctgcccagcgacgccggcagcaacatcacctacagaaccatcaacgactacggcgccctgacccccaagatgaccggcgtgatggag

SEQ ID NO: 330 - RNA, 615 nt, synthetic construct
  misc_feature 1..615: note = Escherichia coli J96__ELL41151.1__Ec(J96)-FimC(37-241) CDS opt5
  source 1..615: mol_type = other RNA
ggcgtggccctgggggctaccagagtcatctaccccgccggacagaagcaagttcagctcgcggtgacaaacaatgacgagaacagcacgtatctgattcagtcctgggtggaaaatgctgatggcgtcaaagacgggcggttcatcgtgacccctccgctttttgccatgaagggcaaaaaggagaacacactgcgcattctcgatgccaccaataaccagctgccccaagacagagaatctcttttctggatgaatgttaaagctatccctagcatggataagtccaagctgacagagaacaccctccagctggccattatctctcggatcaaactgtactatcgccccgctaagctcgccctgcctcccgaccaggcggccgaaaaacttagatttcggcgcagcgctaattccctgacactcattaaccctaccccgtactatctgacggtgaccgagcttaatgccggaacaagagtcctggagaacgctctcgtgccccctatgggggaatctaccgttaagctgcccagcgatgccggatccaatatcacataccggaccattaacgactatggcgcgctgacgcctaaaatgacaggcgtgatggag

SEQ ID NO: 331 - protein, 167 aa, Escherichia coli
  REGION 1..167: note = Escherichia coli J96__ELL41154.1__Ec(J96)-FimG protein
MKWCKRGYVLAAILALASATIQAADVTITVNGKVVAKPCTVSTTNATVDLGDLYSFSLMSAGAASAWHDVALELTNCPVGTSRVTASFSGAADSTGYYKNQGTAQNIQLELQDDSGNTLNTGATKTVQVDDSSQSAHFPLQVRALTVNGGATQGTIQAVISITYTYS

SEQ ID NO: 332 - RNA, 504 nt, Escherichia coli
  misc_feature 1..504: note = Escherichia coli J96__ELL41154.1__Ec(J96)-FimG CDS wt
  source 1..504: mol_type = mRNA
atgaaatggtgcaaacgtgggtatgtattggcggcaatattggcgctcgcaagtgcgacgatacaggcagccgatgtcaccatcacggtgaacggtaaggtcgtcgccaaaccgtgtacggtttccaccaccaatgccacggttgatctcggcgatctttattctttcagtcttatgtctgccggggcggcatcggcctggcatgatgttgcgcttgagttgactaattgtccggtgggaacgtcgagggtcactgccagcttcagcggggcagccgacagtaccggatattataaaaaccaggggaccgcgcaaaacatccagttagagctacaggatgacagtggcaacacattgaatactggcgcaaccaaaacagttcaggtggatgattcctcacaatcagcgcacttcccgttacaggtcagagcattgacagtaaatggcggagccactcagggaaccattcaggcagtgattagcatcacctatacctacagctga

SEQ ID NO: 333 - RNA, 504 nt, synthetic construct
  misc_feature 1..504: note = Escherichia coli J96__ELL41154.1__Ec(J96)-FimG CDS opt1
  source 1..504: mol_type = other RNA
atgaagtggtgcaagcgcggctacgtgctggccgccatcctggcgctggccagcgccaccatccaggccgccgacgtcaccatcacggtgaacgggaaggtggtcgcgaagccctgcaccgtgtccaccaccaacgccacggtggacctgggcgacctctacagcttctccctgatgagcgccggggccgcgtccgcctggcacgacgtcgccctggagctcaccaactgcccggtgggcaccagccgggtgaccgcctccttcagcggggccgcggactccacgggctactacaagaaccagggcaccgcccagaacatccagctggagctgcaggacgacagcgggaacaccctcaacaccggcgccacgaagaccgtccaggtggacgactccagccagtccgcccacttccccctccaggtgcgcgccctgaccgtcaacgggggcgcgacccaggggacgatccaggccgtgatcagcatcacctacacctactcctga

SEQ ID NO: 334 - RNA, 504 nt, synthetic construct; identical to SEQ ID NO: 333
  misc_feature 1..504: note = Escherichia coli J96__ELL41154.1__Ec(J96)-FimG CDS opt1
  source 1..504: mol_type = other RNA

SEQ ID NO: 335 - RNA, 504 nt, synthetic construct
  misc_feature 1..504: note = Escherichia coli J96__ELL41154.1__Ec(J96)-FimG CDS opt3
  source 1..504: mol_type = other RNA
atgaagtggtgcaaaagaggctacgtgctggccgctatcctcgcacttgccagcgcgaccattcaggctgccgacgtcacaataactgttaacgggaaggtggtagcaaaaccctgtacggtgtccaccacaaatgccactgtcgatctgggagacttgtattctttctcattaatgagtgctggtgcagccagcgcttggcacgatgtggccctggagctaaccaactgccctgttggcacatccagggtgaccgcgtctttttcgggggcagccgactcaactggatactataagaatcaaggcacagctcagaacatccagctcgaactgcaggatgacagcggtaatacccttaacacgggggccactaaaaccgtccaagtggatgacagttcccagtctgcacatttcccactgcaggtacgggctttgacagttaatggaggcgccactcagggcaccattcaagcggtgatcagcattacatacacctattcctga

SEQ ID NO: 336 - RNA, 504 nt, synthetic construct
  misc_feature 1..504: note = Escherichia coli J96__ELL41154.1__Ec(J96)-FimG CDS opt4
  source 1..504: mol_type = other RNA
atgaagtggtgcaagagaggctacgtgctggccgccatcctggccctggccagcgccaccatccaggccgccgacgtgaccatcaccgtgaacggcaaggtggtggccaagccctgcaccgtgagcaccaccaacgccaccgtggacctgggcgacctgtacagcttcagcctgatgagcgccggcgccgccagcgcctggcacgacgtggccctggagctgaccaactgccccgtgggcaccagcagagtgaccgccagcttcagcggcgccgccgacagcaccggctactacaagaaccagggcaccgcccagaacatccagctggagctgcaggacgacagcggcaacaccctgaacaccggcgccaccaagaccgtgcaggtggacgacagcagccagagcgcccacttccccctgcaggtgagagccctgaccgtgaacggcggcgccacccagggcaccatccaggccgtgatcagcatcacctacacctacagctga

SEQ ID NO: 337 - RNA, 504 nt, synthetic construct
  misc_feature 1..504: note = Escherichia coli J96__ELL41154.1__Ec(J96)-FimG CDS opt5
  source 1..504: mol_type = other RNA
atgaagtggtgcaaaagaggctacgtgctggccgctatcctcgccctggcgagcgctaccattcaggccgccgacgtcacaatcacggttaacgggaaggtggtggctaaaccctgtaccgtctccacaaccaatgccacagtggatcttggagacctgtattctttcagcctcatgtccgctggcgccgcgtctgcctggcacgatgttgctctggagcttaccaactgccctgtggggacaagccgggtcaccgcctccttttctggagctgccgacagcacgggctactataagaatcaagggaccgcgcagaacattcagctggaactccaggatgactccggaaatacactgaacaccggcgccacaaaaaccgtgcaagttgatgacagctctcagtccgctcatttcccgctccaggtgcgcgccctgacggtcaatggcggggctacacagggaaccatccaagccgtgattagcatcacatacacctattcttga

SEQ ID NO: 338 - protein, 14 aa, Escherichia coli
  REGION 1..14: note = Escherichia coli J96__ELL41154.1__Ec(J96)-FimG(24-37) protein
ADVTITVNGKVVAK

SEQ ID NO: 339 - protein, 14 aa, Escherichia coli
  REGION 1..14: note = Escherichia coli J96__ELL41151.1__Ec(J96)-FimC(135-148) protein
TENTLQLAIISRIK

SEQ ID NO: 340 - RNA, 42 nt, Escherichia coli
  misc_feature 1..42: note = Escherichia coli J96__ELL41154.1__Ec(J96)-FimG(24-37) CDS wt
  source 1..42: mol_type = mRNA
gccgatgtcaccatcacggtgaacggtaaggtcgtcgccaaa

SEQ ID NO: 341 - RNA, 42 nt, Escherichia coli
  misc_feature 1..42: note = Escherichia coli J96__ELL41151.1__Ec(J96)-FimC(135-148) CDS wt
  source 1..42: mol_type = mRNA
actgagaatacgctacagctcgcaattatcagccgcattaaa

SEQ ID NO: 342 - RNA, 42 nt, synthetic construct
  misc_feature 1..42: note = Escherichia coli J96__ELL41154.1__Ec(J96)-FimG(24-37) CDS opt1
  source 1..42: mol_type = other RNA
gccgacgtgaccatcaccgtcaacggcaaggtggtggccaag

SEQ ID NO: 343 - RNA, 42 nt, synthetic construct
  misc_feature 1..42: note = Escherichia coli J96__ELL41151.1__Ec(J96)-FimC(135-148) CDS opt1
  source 1..42: mol_type = other RNA
acggagaacaccctgcagctcgccatcatctcccgcatcaag

SEQ ID NO: 344 - RNA, 42 nt, synthetic construct; identical to SEQ ID NO: 342
  misc_feature 1..42: note = Escherichia coli J96__ELL41154.1__Ec(J96)-FimG(24-37) CDS opt1
  source 1..42: mol_type = other RNA

SEQ ID NO: 345 - RNA, 42 nt, synthetic construct
  misc_feature 1..42: note = Escherichia coli J96__ELL41151.1__Ec(J96)-FimC(135-148) CDS opt1
  source 1..42: mol_type = other RNA
accgagaacaccctgcagctcgccatcatcagccgcatcaag

SEQ ID NO: 346 - RNA, 42 nt, synthetic construct
  misc_feature 1..42: note = Escherichia coli J96__ELL41154.1__Ec(J96)-FimG(24-37) CDS opt3
  source 1..42: mol_type = other RNA
gccgacgtgaccatcacagtcaacggcaaggttgtggctaaa

SEQ ID NO: 347 - RNA, 42 nt, synthetic construct
  misc_feature 1..42: note = Escherichia coli J96__ELL41151.1__Ec(J96)-FimC(135-148) CDS opt3
  source 1..42: mol_type = other RNA
accgagaacacactgcagctcgccatcattagcagaataaag

SEQ ID NO: 348 - RNA, 42 nt, synthetic construct
  misc_feature 1..42: note = Escherichia coli J96__ELL41154.1__Ec(J96)-FimG(24-37) CDS opt4
  source 1..42: mol_type = other RNA
gccgacgtgaccatcaccgtgaacggcaaggtggtggccaag

SEQ ID NO: 349 - RNA, 42 nt, synthetic construct
  misc_feature 1..42: note = Escherichia coli J96__ELL41151.1__Ec(J96)-FimC(135-148) CDS opt4
  source 1..42: mol_type = other RNA
accgagaacaccctgcagctggccatcatcagcagaatcaag

SEQ ID NO: 350 - RNA, 42 nt, synthetic construct; identical to SEQ ID NO: 346
  misc_feature 1..42: note = Escherichia coli J96__ELL41154.1__Ec(J96)-FimG(24-37) CDS opt5
  source 1..42: mol_type = other RNA

SEQ ID NO: 351 - RNA, 42 nt, synthetic construct
  misc_feature 1..42: note = Escherichia coli J96__ELL41151.1__Ec(J96)-FimC(135-148) CDS opt5
  source 1..42: mol_type = other RNA
accgagaacacactgcagctcgccatcattagcagaatcaag

SEQ ID NO: 352 - protein, 5 aa, synthetic construct
  REGION 1..5: note = Artificial____Linker-PGDGN protein
PGDGN

SEQ ID NO: 353 - protein, 7 aa, synthetic construct
  REGION 1..7: note = Artificial____Linker-G4SGG protein
GGGGSGG

SEQ ID NO: 354 - protein, 15 aa, synthetic construct
  REGION 1..15: note = Artificial____Linker-(G4S)3 protein
GGGGSGGGGSGGGGS

SEQ ID NO: 355 - skipped

SEQ ID NO: 356 - protein, 4 aa, synthetic construct
  REGION 1..4: note = Artificial____Linker-SGGM protein
SGGM

SEQ ID NO: 357 - protein, 15 aa, synthetic construct
  REGION 1..15: note = Artificial____Linker-(GGS)4-GGG protein
GGSGGSGGSGGSGGG

SEQ ID NO: 358 - protein, 12 aa, synthetic construct
  REGION 1..12: note = Artificial____Linker-(GGS)4 protein
GGSGGSGGSGGS

SEQ ID NO: 359 - RNA, 15 nt, synthetic construct
  misc_feature 1..15: note = Artificial____Linker-PGDGN CDS opt1
  source 1..15: mol_type = other RNA
cccggcgacgggaac

SEQ ID NO: 360 - RNA, 21 nt, synthetic construct
  misc_feature 1..21: note = Artificial____Linker-G4SGG CDS opt1
  source 1..21: mol_type = other RNA
ggcggcggcggctccggaggc

SEQ ID NO: 361 - RNA, 45 nt, synthetic construct
  misc_feature 1..45: note = Artificial____Linker-(G4S)3 CDS opt1
  source 1..45: mol_type = other RNA
ggcgggggcgggagcggcgggggcggctccgggggcgggggcagc

SEQ ID NO: 362 - skipped

SEQ ID NO: 363 - RNA, 12 nt, synthetic construct
  misc_feature 1..12: note = Artificial____Linker-SGGM CDS opt1
  source 1..12: mol_type = other RNA
agcggcgggatg

SEQ ID NO: 364 - RNA, 45 nt, synthetic construct
  misc_feature 1..45: note = Artificial____Linker-(GGS)4-GGG CDS opt1
  source 1..45: mol_type = other RNA
ggcgggagcggcgggtccggcgggagcggcggctccgggggcggg

SEQ ID NO: 365 - RNA, 36 nt, synthetic construct
  misc_feature 1..36: note = Artificial____Linker-(GGS)4 CDS opt1
  source 1..36: mol_type = other RNA
ggcgggagcggcgggtccggcgggagcggcggctcc

SEQ ID NO: 366 - RNA, 15 nt, synthetic construct
  misc_feature 1..15: note = Artificial____Linker-PGDGN CDS opt1
  source 1..15: mol_type = other RNA
cccggcgacgggaac

SEQ ID NO: 367 - RNA, 21 nt, synthetic construct
  misc_feature 1..21: note = Artificial____Linker-G4SGG CDS opt1
  source 1..21: mol_type = other RNA
ggcgggggcgggagcggcggg

SEQ ID NO: 368 - RNA, 45 nt, synthetic construct; identical to SEQ ID NO: 361
  misc_feature 1..45: note = Artificial____Linker-(G4S)3 CDS opt1
  source 1..45: mol_type = other RNA

SEQ ID NO: 369 - skipped

SEQ ID NO: 370 - RNA, 12 nt, synthetic construct
  misc_feature 1..12: note = Artificial____Linker-SGGM CDS opt1
  source 1..12: mol_type = other RNA
agcggcgggatg

SEQ ID NO: 371 - RNA, 45 nt, synthetic construct; identical to SEQ ID NO: 364
  misc_feature 1..45: note = Artificial____Linker-(GGS)4-GGG CDS opt1
  source 1..45: mol_type = other RNA

SEQ ID NO: 372 - RNA, 36 nt, synthetic construct; identical to SEQ ID NO: 365
  misc_feature 1..36: note = Artificial____Linker-(GGS)4 CDS opt1
  source 1..36: mol_type = other RNA

SEQ ID NO: 373 - RNA, 15 nt, synthetic construct
  misc_feature 1..15: note = Artificial____Linker-PGDGN CDS opt3
  source 1..15: mol_type = other RNA
cccggcgacgggaac

SEQ ID NO: 374 - RNA, 21 nt, synthetic construct
  misc_feature 1..21: note = Artificial____Linker-G4SGG CDS opt3
  source 1..21: mol_type = other RNA
ggcgggggaggtagcggcggg

SEQ ID NO: 375 - RNA, 45 nt, synthetic construct
  misc_feature 1..45: note = Artificial____Linker-(G4S)3 CDS opt3
  source 1..45: mol_type = other RNA
ggcgggggaggtagcggcgggggaggctccggtgggggaggctct

SEQ ID NO: 376 - skipped

SEQ ID NO: 377 - RNA, 12 nt, synthetic construct
  misc_feature 1..12: note = Artificial____Linker-SGGM CDS opt3
  source 1..12: mol_type = other RNA
agcggcgggatg

SEQ ID NO: 378 - RNA, 45 nt, synthetic construct
  misc_feature 1..45: note = Artificial____Linker-(GGS)4-GGG CDS opt3
  source 1..45: mol_type = other RNA
ggcgggagcggaggttccggcgggtctggaggctcaggtggggga

SEQ ID NO: 379 - RNA, 36 nt, synthetic construct
  misc_feature 1..36: note = Artificial____Linker-(GGS)4 CDS opt3
  source 1..36: mol_type = other RNA
ggcgggagcggaggttccggcgggtctggaggctca

SEQ ID NO: 380 - RNA, 15 nt, synthetic construct
  misc_feature 1..15: note = Artificial____Linker-PGDGN CDS opt4
  source 1..15: mol_type = other RNA
cccggcgacggcaac

SEQ ID NO: 381 - RNA, 21 nt, synthetic construct
  misc_feature 1..21: note = Artificial____Linker-G4SGG CDS opt4
  source 1..21: mol_type = other RNA
ggcggcggcggcagcggcggc

SEQ ID NO: 382 - RNA, 45 nt, synthetic construct
  misc_feature 1..45: note = Artificial____Linker-(G4S)3 CDS opt4
  source 1..45: mol_type = other RNA
ggcggcggcggcagcggcggcggcggcagcggcggcggcggcagc

SEQ ID NO: 383 - skipped

SEQ ID NO: 384 - RNA, 12 nt, synthetic construct
  misc_feature 1..12: note = Artificial____Linker-SGGM CDS opt4
  source 1..12: mol_type = other RNA
agcggcggcatg

SEQ ID NO: 385 - RNA, 45 nt, synthetic construct
  misc_feature 1..45: note = Artificial____Linker-(GGS)4-GGG CDS opt4
  source 1..45: mol_type = other RNA
ggcggcagcggcggcagcggcggcagcggcggcagcggcggcggc

SEQ ID NO: 386 - RNA, 36 nt, synthetic construct
  misc_feature 1..36: note = Artificial____Linker-(GGS)4 CDS opt4
  source 1..36: mol_type = other RNA
ggcggcagcggcggcagcggcggcagcggcggcagc

SEQ ID NO: 387 - RNA, 15 nt, synthetic construct
  misc_feature 1..15: note = Artificial____Linker-PGDGN CDS opt5
  source 1..15: mol_type = other RNA
cccggcgacgggaac

SEQ ID NO: 388 - RNA, 21 nt, synthetic construct
  misc_feature 1..21: note = Artificial____Linker-G4SGG CDS opt5
  source 1..21: mol_type = other RNA
ggcgggggaggcagcggggga

SEQ ID NO: 389 - RNA, 45 nt, synthetic construct
  misc_feature 1..45: note = Artificial____Linker-(G4S)3 CDS opt5
  source 1..45: mol_type = other RNA
ggcgggggaggcagcgggggaggcgggtccggaggcggcgggtct

SEQ ID NO: 390 - skipped

SEQ ID NO: 391 - RNA, 12 nt, synthetic construct
  misc_feature 1..12: note = Artificial____Linker-SGGM CDS opt5
  source 1..12: mol_type = other RNA
agcggcgggatg

SEQ ID NO: 392 - RNA, 45 nt, synthetic construct
  misc_feature 1..45: note = Artificial____Linker-(GGS)4-GGG CDS opt5
  source 1..45: mol_type = other RNA
ggcgggagcggaggctccgggggatctggcgggagcggaggcggc

SEQ ID NO: 393 - RNA, 36 nt, synthetic construct
  misc_feature 1..36: note = Artificial____Linker-(GGS)4 CDS opt5
  source 1..36: mol_type = other RNA
ggcgggagcggaggctccgggggatctggcgggagc

SEQ ID NO: 394 - protein, 18 aa, Homo sapiens
  REGION 1..18: note = Homo sapiens__AAB59424.1__SignalPeptide-HsIgE(1-18) protein
MDWTWILFLVAAATRVHS

SEQ ID NO: 395 - protein, 20 aa, Mus musculus
  REGION 1..20: note = Mus musculus__BAR42292.1__SignalPeptide-MmIgK(1-20) protein
METDTLLLWVLLLWVPGSTG

SEQ ID NO: 396 - protein, 21 aa, Escherichia coli
  REGION 1..21: note = Escherichia coli J96__ELL41155.1__SignalPeptide-Ec(J96)-FimH(1-21) protein
MKRVITLFAVLLMGWSVNAWS

SEQ ID NO: 397 - protein, 36 aa, Escherichia coli
  REGION 1..36: note = Escherichia coli J96__ELL41151.1__SignalPeptide-Ec(J96)-FimC(1-36) protein
MSNKNVNVRKSQEITFCLLAGILMFMAMMVAGRAEA

SEQ ID NO: 398 - protein, 22 aa, Homo sapiens
  REGION 1..22: note = Homo sapiens__AAA61213.1__SignalPeptide-HsPLAT(1-22) protein
MDAMKRGLCCVLLLCGAVFVSP

SEQ ID NO: 399 - protein, 18 aa, Homo sapiens
  REGION 1..18: note = Homo sapiens__NP_000468.1__SignalPeptide-HsALB(1-18) protein
MKWVTFISLLFLFSSAYS

SEQ ID NO: 400 - protein, 24 aa, Homo sapiens
  REGION 1..24: note = Homo sapiens__AAA59606.1__SignalPeptide-HsHLA-A2(1-24) protein
MAVMAPRTLVLLLSGALALTQTWA

SEQ ID NO: 401 - RNA, 54 nt, Homo sapiens
  misc_feature 1..54: note = Homo sapiens__AAB59424.1__SignalPeptide-HsIgE(1-18) CDS wt
  source 1..54: mol_type = mRNA
atggactggacctggatcctcttcttggtggcagcagccacgcgagtccactcc

SEQ ID NO: 402 - RNA, 60 nt, Mus musculus
  misc_feature 1..60: note = Mus musculus__BAR42292.1__SignalPeptide-MmIgK(1-20) CDS wt
  source 1..60: mol_type = mRNA
atggagacagacacactcctgctatgggtgctgctgctctgggttccaggttccacaggt

SEQ ID NO: 403 - RNA, 63 nt, Escherichia coli
  misc_feature 1..63: note = Escherichia coli J96__ELL41155.1__SignalPeptide-Ec(J96)-FimH(1-21) CDS wt
  source 1..63: mol_type = mRNA
atgaaacgagttattaccctgtttgctgtactgctgatgggctggtcggtaaatgcctggtca

SEQ ID NO: 404 - RNA, 108 nt, Escherichia coli
  misc_feature 1..108: note = Escherichia coli J96__ELL41151.1__SignalPeptide-Ec(J96)-FimC(1-36) CDS wt
  source 1..108: mol_type = mRNA
gtgagtaataaaaacgtcaatgtaaggaaatcgcaggaaataacattctgcttgctggcaggtatcctgatgttcatggcaatgatggttgccggacgcgctgaagcg

SEQ ID NO: 405 - RNA, 66 nt, Homo sapiens
  misc_feature 1..66: note = Homo sapiens__AAA61213.1__SignalPeptide-HsPLAT(1-22) CDS wt
  source 1..66: mol_type = mRNA
atggatgcaatgaagagagggctctgctgtgtgctgctgctgtgtggagcagtcttcgtttcgccc

SEQ ID NO: 406 - RNA, 54 nt, Homo sapiens
  misc_feature 1..54: note = Homo sapiens__NP_000468.1__SignalPeptide-HsALB(1-18) CDS wt
  source 1..54: mol_type = mRNA
atgaagtgggtaacctttatttcccttctttttctctttagctcggcttattcc

SEQ ID NO: 407 - RNA, 72 nt, Homo sapiens
  misc_feature 1..72: note = Homo sapiens__AAA59606.1__SignalPeptide-HsHLA-A2(1-24) CDS wt
  source 1..72: mol_type = mRNA
atggccgtcatggcgccccgaaccctcgtcctgctactctcgggggctctggccctgacccagacctgggcg

SEQ ID NO: 408 - RNA, 54 nt, synthetic construct
  misc_feature 1..54: note = Homo sapiens__AAB59424.1__SignalPeptide-HsIgE(1-18) CDS opt1
  source 1..54: mol_type = other RNA
atggactggacctggatcctgttcctcgtggccgccgcgacccgcgtccacagc

SEQ ID NO: 409 - RNA, 60 nt, synthetic construct
  misc_feature 1..60: note = Mus musculus__BAR42292.1__SignalPeptide-MmIgK(1-20) CDS opt1
  source 1..60: mol_type = other RNA
atggagaccgacaccctgctcctgtgggtgctgctcctgtgggtccccggcagcacgggg

SEQ ID NO: 410 - RNA, 63 nt, synthetic construct
  misc_feature 1..63: note = Escherichia coli J96__ELL41155.1__SignalPeptide-Ec(J96)-FimH(1-21) CDS opt1
  source 1..63: mol_type = other RNA
atgaagcgcgtgatcaccctgttcgccgtcctcctgatgggctggagcgtgaacgcctggtcc

SEQ ID NO: 411 - RNA, 108 nt, synthetic construct
  misc_feature 1..108: note = Escherichia coli J96__ELL41151.1__SignalPeptide-Ec(J96)-FimC(1-36) CDS opt1
  source 1..108: mol_type = other RNA
atgagcaacaagaacgtgaacgtccgcaagtcccaggagatcaccttctgcctgctcgccggcatcctgatgttcatggccatgatggtggcggggcgggccgaggcc

SEQ ID NO: 412 - RNA, 66 nt, synthetic construct
  misc_feature 1..66: note = Homo sapiens__AAA61213.1__SignalPeptide-HsPLAT(1-22) CDS opt1
  source 1..66: mol_type = other RNA
atggacgccatgaagcgcggcctgtgctgcgtgctcctgctgtgcggggccgtcttcgtgagcccc

SEQ ID NO: 413 - RNA, 54 nt, synthetic construct
  misc_feature 1..54: note = Homo sapiens__NP_000468.1__SignalPeptide-HsALB(1-18) CDS opt1
  source 1..54: mol_type = other RNA
atgaagtgggtgaccttcatcagcctcctgttcctgttctccagcgcctactcc

SEQ ID NO: 414 - RNA, 72 nt, synthetic construct
  misc_feature 1..72: note = Homo sapiens__AAA59606.1__SignalPeptide-HsHLA-A2(1-24) CDS opt1
  source 1..72: mol_type = other RNA
atggccgtgatggccccgcggaccctggtcctcctgctgagcggcgcgctcgccctgacccagacgtgggcc

SEQ ID NO: 415 - RNA, 54 nt, synthetic construct; identical to SEQ ID NO: 408
  misc_feature 1..54: note = Homo sapiens__AAB59424.1__SignalPeptide-HsIgE(1-18) CDS opt1
  source 1..54: mol_type = other RNA

SEQ ID NO: 416 - RNA, 60 nt, synthetic construct; identical to SEQ ID NO: 409
  misc_feature 1..60: note = Mus musculus__BAR42292.1__SignalPeptide-MmIgK(1-20) CDS opt1
  source 1..60: mol_type = other RNA

SEQ ID NO: 417 - RNA, 63 nt, synthetic construct; identical to SEQ ID NO: 410
  misc_feature 1..63: note = Escherichia coli J96__ELL41155.1__SignalPeptide-Ec(J96)-FimH(1-21) CDS opt1
  source 1..63: mol_type = other RNA

SEQ ID NO: 418 - RNA, 108 nt, synthetic construct; identical to SEQ ID NO: 411
  misc_feature 1..108: note = Escherichia coli J96__ELL41151.1__SignalPeptide-Ec(J96)-FimC(1-36) CDS opt1
  source 1..108: mol_type = other RNA

SEQ ID NO: 419 - RNA, 66 nt, synthetic construct; identical to SEQ ID NO: 412
  misc_feature 1..66: note = Homo sapiens__AAA61213.1__SignalPeptide-HsPLAT(1-22) CDS opt1
  source 1..66: mol_type = other RNA

SEQ ID NO: 420 - RNA, 54 nt, synthetic construct; identical to SEQ ID NO: 413
  misc_feature 1..54: note = Homo sapiens__NP_000468.1__SignalPeptide-HsALB(1-18) CDS opt1
  source 1..54: mol_type = other RNA

SEQ ID NO: 421 - RNA, 72 nt, synthetic construct
  misc_feature 1..72: note = Homo sapiens__AAA59606.1__SignalPeptide-HsHLA-A2(1-24) CDS opt1
  source 1..72: mol_type = other RNA
atggccgtgatggcgccccgcaccctggtcctcctgctgagcggcgccctcgccctgacccagacgtgggcc

SEQ ID NO: 422 - RNA, 54 nt, synthetic construct
  misc_feature 1..54: note = Homo sapiens__AAB59424.1__SignalPeptide-HsIgE(1-18) CDS opt3
  source 1..54: mol_type = other RNA
atggactggacctggatcctgttcctcgtggccgctgcaacaagagtccacagc

SEQ ID NO: 423 - RNA, 60 nt, synthetic construct
  misc_feature 1..60: note = Mus musculus__BAR42292.1__SignalPeptide-MmIgK(1-20) CDS opt3
  source 1..60: mol_type = other RNA
atggagaccgacacactgctcctttgggtgctgttgttatgggtccccggcagcactggg

SEQ ID NO: 424 - RNA, 63 nt, synthetic construct
  misc_feature 1..63: note = Escherichia coli J96__ELL41155.1__SignalPeptide-Ec(J96)-FimH(1-21) CDS opt3
  source 1..63: mol_type = other RNA
atgaagagagtgatcaccctgttcgccgtcctccttatgggctggagcgttaacgcttggtcc

SEQ ID NO: 425 - RNA, 108 nt, synthetic construct
  misc_feature 1..108: note = Escherichia coli J96__ELL41151.1__SignalPeptide-Ec(J96)-FimC(1-36) CDS opt3
  source 1..108: mol_type = other RNA
atgagcaacaagaatgtgaacgtcagaaaatcccaggagatcaccttctgcctgctcgccggcattcttatgtttatggctatgatggttgcagggagggccgaagcg

SEQ ID NO: 426 - RNA, 66 nt, synthetic construct
  misc_feature 1..66: note = Homo sapiens__AAA61213.1__SignalPeptide-HsPLAT(1-22) CDS opt3
  source 1..66: mol_type = other RNA
atggacgccatgaagagaggcctgtgctgtgtgctccttctgtgcggggctgtcttcgttagcccc

SEQ ID NO: 427 - RNA, 54 nt, synthetic construct
  misc_feature 1..54: note = Homo sapiens__NP_000468.1__SignalPeptide-HsALB(1-18) CDS opt3
  source 1..54: mol_type = other RNA
atgaagtgggtgaccttcatcagcctgctctttcttttctcctctgcctactca

SEQ ID NO: 428 - RNA, 72 nt, synthetic construct
  misc_feature 1..72: note = Homo sapiens__AAA59606.1__SignalPeptide-HsHLA-A2(1-24) CDS opt3
  source 1..72: mol_type = other RNA
atggccgtgatggctcccagaaccctggtcctccttctgagcggcgcattggccttaacacagacttgggcg

SEQ ID NO: 429 - RNA, 54 nt, synthetic construct
  misc_feature 1..54: note = Homo sapiens__AAB59424.1__SignalPeptide-HsIgE(1-18) CDS opt4
  source 1..54: mol_type = other RNA
atggactggacctggatcctgttcctggtggccgccgccaccagagtgcacagc

SEQ ID NO: 430 - RNA, 60 nt, synthetic construct
  misc_feature 1..60: note = Mus musculus__BAR42292.1__SignalPeptide-MmIgK(1-20) CDS opt4
  source 1..60: mol_type = other RNA
atggagaccgacaccctgctgctgtgggtgctgctgctgtgggtgcccggcagcaccggc

SEQ ID NO: 431 - RNA, 63 nt, synthetic construct
  misc_feature 1..63: note = Escherichia coli J96__ELL41155.1__SignalPeptide-Ec(J96)-FimH(1-21) CDS opt4
  source 1..63: mol_type = other RNA
atgaagagagtgatcaccctgttcgccgtgctgctgatgggctggagcgtgaacgcctggagc

SEQ ID NO: 432 - RNA, 108 nt, synthetic construct
  misc_feature 1..108: note = Escherichia coli J96__ELL41151.1__SignalPeptide-Ec(J96)-FimC(1-36) CDS opt4
  source 1..108: mol_type = other RNA
atgagcaacaagaacgtgaacgtgagaaagagccaggagatcaccttctgcctgctggccggcatcctgatgttcatggccatgatggtggccggcagagccgaggcc

SEQ ID NO: 433 - RNA, 66 nt, synthetic construct
  misc_feature 1..66: note = Homo sapiens__AAA61213.1__SignalPeptide-HsPLAT(1-22) CDS opt4
  source 1..66: mol_type = other RNA
atggacgccatgaagagaggcctgtgctgcgtgctgctgctgtgcggcgccgtgttcgtgagcccc

SEQ ID NO: 434 - RNA, 54 nt, synthetic construct
  misc_feature 1..54: note = Homo sapiens__NP_000468.1__SignalPeptide-HsALB(1-18) CDS opt4
  source 1..54: mol_type = other RNA
atgaagtgggtgaccttcatcagcctgctgttcctgttcagcagcgcctacagc

SEQ ID NO: 435 - RNA, 72 nt, synthetic construct
  misc_feature 1..72: note = Homo sapiens__AAA59606.1__SignalPeptide-HsHLA-A2(1-24) CDS opt4
  source 1..72: mol_type = other RNA
atggccgtgatggcccccagaaccctggtgctgctgctgagcggcgccctggccctgacccagacctgggcc

SEQ ID NO: 436 - RNA, 54 nt, synthetic construct
  misc_feature 1..54: note = Homo sapiens__AAB59424.1__SignalPeptide-HsIgE(1-18) CDS opt5
  source 1..54: mol_type = other RNA
atggactggacctggatcctgttcctcgtggccgctgccacaagagtccacagc

SEQ ID NO: 437 - RNA, 60 nt, synthetic construct
  misc_feature 1..60: note = Mus musculus__BAR42292.1__SignalPeptide-MmIgK(1-20) CDS opt5
  source 1..60: mol_type = other RNA
atggagaccgacacactgctcctgtgggtgcttctgctctgggtccccggcagcacgggg

SEQ ID NO: 438 - RNA, 63 nt, synthetic construct
  misc_feature 1..63: note = Escherichia coli J96__ELL41155.1__SignalPeptide-Ec(J96)-FimH(1-21) CDS opt5
  source 1..63: mol_type = other RNA
atgaagagagtgatcaccctgttcgccgtcctcctgatgggctggagcgttaacgcttggtcc

SEQ ID NO: 439 - RNA, 108 nt, synthetic construct
  misc_feature 1..108: note = Escherichia coli J96__ELL41151.1__SignalPeptide-Ec(J96)-FimC(1-36) CDS opt5
  source 1..108: mol_type = other RNA
atgagcaacaagaatgtgaacgtcagaaaatcccaggagatcaccttctgcctgctcgccggcattctgatgtttatggctatgatggttgccgggcgggcggaagct

SEQ ID NO: 440 - RNA, 66 nt, synthetic construct
  misc_feature 1..66: note = Homo sapiens__AAA61213.1__SignalPeptide-HsPLAT(1-22) CDS opt5
  source 1..66: mol_type = other RNA
atggacgccatgaagagaggcctgtgctgtgtgctcctgctttgcggggctgtcttcgttagcccc

SEQ ID NO: 441 - RNA, 54 nt, synthetic construct
  misc_feature 1..54: note = Homo sapiens__NP_000468.1__SignalPeptide-HsALB(1-18) CDS opt5
  source 1..54: mol_type = other RNA
atgaagtgggtgaccttcatcagcctgctctttctgttctcctctgcctacagc

SEQ ID NO: 442 - RNA, 72 nt, synthetic construct
  misc_feature 1..72: note = Homo sapiens__AAA59606.1__SignalPeptide-HsHLA-A2(1-24) CDS opt5
  source 1..72: mol_type = other RNA
atggccgtgatggctcccagaaccctggtcctcctgcttagcggcgccctggcgctcacacagacgtgggct

SEQ ID NO: 443 - protein, 154 aa, Aquifex aeolicus
  REGION 1..154: note = Aquifex aeolicus VF5__NP_213089.1__LumSynth(1-154) protein
MQIYEGKLTAEGLRFGIVASRFNHALVDRLVEGAIDCIVRHGGREEDITLVRVPGSWEIPVAAGELARKEDIDAVIAIGVLIRGATPHFDYIASEVSKGLANLSLELRKPITFGVITADTLEQAIERAGTKHGNKGWEAALSAIEMANLFKSLR

SEQ ID NO: 444 - protein, 154 aa, synthetic construct
  REGION 1..154: note = Aquifex aeolicus VF5__NP_213089.1__LumSynth(1-154_C37A_N102D) protein
MQIYEGKLTAEGLRFGIVASRFNHALVDRLVEGAIDAIVRHGGREEDITLVRVPGSWEIPVAAGELARKEDIDAVIAIGVLIRGATPHFDYIASEVSKGLADLSLELRKPITFGVITADTLEQAIERAGTKHGNKGWEAALSAIEMANLFKSLR

SEQ ID NO: 445 - RNA, 462 nt, Aquifex aeolicus
  misc_feature 1..462: note = Aquifex aeolicus VF5__NP_213089.1__LumSynth(1-154) CDS wt
  source 1..462: mol_type = mRNA
atgcaaatttacgaagggaaactaaccgctgaagggctgaggttcggtatagtggcttccaggttcaaccacgcactcgtggatagactagttgagggagctatagactgcatagtaagacacgggggaagggaagaagacataacgctcgttagagtgccgggctcctgggaaattcccgtggctgcgggagagcttgcgagaaaagaggacatagacgctgtgatagcgataggagttctaataaggggggctactccccactttgattacatagcctctgaagtgtcaaaagggcttgcgaacctttccttagaactgagaaaacccataaccttcggtgttataactgcggacaccttggagcaggcgatagaaagggcgggaacaaagcacgggaataagggctgggaagctgcactttccgcaatagaaatggcaaacttatttaagagtctgaga

SEQ ID NO: 446 - RNA, 462 nt, synthetic construct
  misc_feature 1..462: note = Aquifex aeolicus VF5__NP_213089.1__LumSynth(1-154_C37A_N102D) CDS wt
  source 1..462: mol_type = other RNA
atgcaaatttacgaagggaaactaaccgctgaagggctgaggttcggtatagtggcttccaggttcaaccacgcactcgtggatagactagttgagggagctatagacgccatagtaagacacgggggaagggaagaagacataacgctcgttagagtgccgggctcctgggaaattcccgtggctgcgggagagcttgcgagaaaagaggacatagacgctgtgatagcgataggagttctaataaggggggctactccccactttgattacatagcctctgaagtgtcaaaagggcttgcggacctttccttagaactgagaaaacccataaccttcggtgttataactgcggacaccttggagcaggcgatagaaagggcgggaacaaagcacgggaataagggctgggaagctgcactttccgcaatagaaatggcaaacttatttaagagtctgaga

SEQ ID NO: 447 - RNA, 462 nt, synthetic construct
  misc_feature 1..462: note = Aquifex aeolicus VF5__NP_213089.1__LumSynth(1-154) CDS opt1
  source 1..462: mol_type = other RNA
atgcagatctacgagggcaagctgaccgccgaggggctccgcttcggcatcgtggccagccggttcaaccacgcgctggtcgaccgcctggtggagggggccatcgactgcatcgtgcggcacggcgggcgcgaggaggacatcaccctcgtccgggtgcccggctcctgggagatcccggtggccgccggcgagctggcccgcaaggaggacatcgacgcggtcatcgccatcggggtgctgatccggggcgccacgccccacttcgactacatcgccagcgaggtgtccaaggggctcgcgaacctgagcctggagctccgcaagcccatcaccttcggcgtcatcaccgccgacaccctggagcaggccatcgagcgggccgggacgaagcacggcaacaagggctgggaggccgcgctgtccgccatcgagatggccaacctcttcaagagcctgcgc

SEQ ID NO: 448 - RNA, 462 nt, synthetic construct
  misc_feature 1..462: note = Aquifex aeolicus VF5__NP_213089.1__LumSynth(1-154_C37A_N102D) CDS opt1
  source 1..462: mol_type = other RNA
atgcagatctacgagggcaagctgaccgccgaggggctccgcttcggcatcgtggccagccggttcaaccacgcgctggtcgaccgcctggtggagggggccatcgacgccatcgtgcggcacggcgggcgcgaggaggacatcaccctcgtccgggtgcccggctcctgggagatcccggtggccgccggcgagctggcccgcaaggaggacatcgacgcggtcatcgccatcggggtgctgatccggggcgccacgccccacttcgactacatcgccagcgaggtgtccaaggggctcgcggacctgagcctggagctccgcaagcccatcaccttcggcgtcatcaccgccgacaccctggagcaggccatcgagcgggccgggacgaagcacggcaacaagggctgggaggccgcgctgtccgccatcgagatggccaacctcttcaagagcctgcgc

SEQ ID NO: 449 - RNA, 462 nt, synthetic construct; identical to SEQ ID NO: 447
  misc_feature 1..462: note = Aquifex aeolicus VF5__NP_213089.1__LumSynth(1-154) CDS opt1
  source 1..462: mol_type = other RNA

SEQ ID NO: 450 - RNA, 462 nt, synthetic construct
  misc_feature 1..462: note = Aquifex aeolicus VF5__NP_213089.1__LumSynth(1-154_C37A_N102D) CDS opt1
  source 1..462: mol_type = other RNA
atgcagatctacgagggcaagctgaccgccgaggggctccgcttcggcatcgtggccagccggttcaaccacgcgctggtcgaccgcctggtggagggggccatcgacgccatcgtgcggcacggcgggcgcgaggaggacatcaccctcgtccgggtgcccggctcctgggagatcccggtggccgccggcgagctggcgcgcaaggaggacatcgacgccgtcatcgccatcggggtgctgatccggggcgccacgccccacttcgactacatcgcgagcgaggtgtccaaggggctcgccgacctgagcctggagctccgcaagcccatcaccttcggcgtcatcaccgccgacaccctggagcaggccatcgagcgggccgggacgaagcacggcaacaagggctgggaggcggccctgtccgccatcgagatggccaacctcttcaagagcctgcgc

SEQ ID NO: 451 - RNA, 462 nt, synthetic construct
  misc_feature 1..462: note = Aquifex aeolicus VF5__NP_213089.1__LumSynth(1-154) CDS opt3
  source 1..462: mol_type = other RNA
atgcagatctacgagggcaagctgaccgccgaagggctcagattcggaattgtggctagcaggtttaaccacgcacttgtcgaccggctggttgagggtgccatagattgcatcgtgcgccatggcgggcgagaagaggacattacattggtacgtgtgcccggatcctgggaaatccctgtcgcggctggcgagttagccagaaaagaggatattgacgcagtgatcgccataggtgttctgatcaggggagctactccacacttcgattatattgcatctgaagtgtcaaaggggctagccaatctcagtctggagcttcggaaaccgatcacgtttggcgtcattaccgctgacacactggaacaagccatcgagcgcgcgggcactaagcatgggaacaaaggatgggaggcagccttgagcgctatagaaatggccaatctcttcaagtccctgaga

SEQ ID NO: 452 - RNA, 462 nt, synthetic construct
  misc_feature 1..462: note = Aquifex aeolicus VF5__NP_213089.1__LumSynth(1-154_C37A_N102D) CDS opt3
  source 1..462: mol_type = other RNA
atgcagatctacgagggcaagctgaccgccgaagggctcagattcggaattgtggctagcaggtttaaccacgcacttgtcgaccggctggttgagggtgccatagatgcgatcgtgcgccatggcgggcgagaagaggacattacattggtacgtgtgcccggatcctgggaaatccctgtcgctgccggcgagttagcaagaaaagaggatattgacgccgtgatcgctataggtgttctgatcaggggagcaactccacacttcgattatattgcctctgaagtgtcaaaggggctagctgacctcagtctggagcttcggaaaccgatcacgtttggcgtcattaccgccgatacactggaacaagcgatcgagcgcgcaggcactaagcatgggaataaaggatgggaggccgctttgagcgccatagaaatggcaaacctcttcaagtccctgaga

SEQ ID NO: 453 - RNA, 462 nt, synthetic construct
  misc_feature 1..462: note = Aquifex aeolicus VF5__NP_213089.1__LumSynth(1-154) CDS opt4
  source 1..462: mol_type = other RNA
atgcagatctacgagggcaagctgaccgccgagggcctgagattcggcatcgtggccagcagattcaaccacgccctggtggacagactggtggagggcgccatcgactgcatcgtgagacacggcggcagagaggaggacatcaccctggtgagagtgcccggcagctgggagatccccgtggccgccggcgagctggccagaaaggaggacatcgacgccgtgatcgccatcggcgtgctgatcagaggcgccaccccccacttcgactacatcgccagcgaggtgagcaagggcctggccaacctgagcctggagctgagaaagcccatcaccttcggcgtgatcaccgccgacaccctggagcaggccatcgagagagccggcaccaagcacggcaacaagggctgggaggccgccctgagcgccatcgagatggccaacctgttcaagagcctgaga

SEQ ID NO: 454 - RNA, 462 nt, synthetic construct
  misc_feature 1..462: note = Aquifex aeolicus VF5__NP_213089.1__LumSynth(1-154_C37A_N102D) CDS opt4
  source 1..462: mol_type = other RNA
atgcagatctacgagggcaagctgaccgccgagggcctgagattcggcatcgtggccagcagattcaaccacgccctggtggacagactggtggagggcgccatcgacgccatcgtgagacacggcggcagagaggaggacatcaccctggtgagagtgcccggcagctgggagatccccgtggccgccggcgagctggccagaaaggaggacatcgacgccgtgatcgccatcggcgtgctgatcagaggcgccaccccccacttcgactacatcgccagcgaggtgagcaagggcctggccgacctgagcctggagctgagaaagcccatcaccttcggcgtgatcaccgccgacaccctggagcaggccatcgagagagccggcaccaagcacggcaacaagggctgggaggccgccctgagcgccatcgagatggccaacctgttcaagagcctgaga

SEQ ID NO: 455 - RNA, 462 nt, synthetic construct
  misc_feature 1..462: note = Aquifex aeolicus VF5__NP_213089.1__LumSynth(1-154) CDS opt5
  source 1..462: mol_type = other RNA
atgcagatctacgagggcaagctgaccgccgaagggctcagattcggaattgtggctagccggtttaaccacgccctggtcgaccgccttgttgagggcgcgatcgattgcattgtgagacatgggggacgggaagaggacatcacactggtgcgcgtccccggctcctgggaaattcctgtggctgccggggagctcgccagaaaagaggatatcgacgctgttatcgccattggagtgctgatccggggcgctacgccgcacttcgattatattgcctctgaagtcagcaagggccttgcgaatctgtccctcgagctgcgcaaacccatcacctttggggtgattacagccgacaccctggaacaagctatcgagagagccggaacaaagcatggcaacaaagggtgggaggctgccctctctgcgattgaaatggccaatctgttcaagagccttcgg

SEQ ID NO: 456 - RNA, 462 nt, synthetic construct
  misc_feature 1..462: note = Aquifex aeolicus VF5__NP_213089.1__LumSynth(1-154_C37A_N102D) CDS opt5
  source 1..462: mol_type = other RNA
atgcagatctacgagggcaagctgaccgccgaagggctcagattcggaattgtggctagccggtttaaccacgccctggtcgaccgccttgttgagggcgcgatcgatgctattgtgagacatgggggacgggaagaggacatcacactggtgcgcgtccccggctcctgggaaattcctgtggccgccggggagctcgctagaaaagaggatatcgacgccgttatcgctattggagtgctgatccggggcgccacgccgcacttcgattatattgcgtctgaagtcagcaagggccttgccgacctgtccctcgagctgcgcaaacccatcacctttggggtgattacagctgataccctggaacaagccatcgagagagctggaacaaagcatggcaataaagggtgggaggccgcgctctctgccattgaaatggctaacctgttcaagagccttcgg

SEQ ID NO: 457 - protein, 163 aa, Helicobacter pylori
  REGION 1..163: note = Helicobacter pylori J99__AAD06160.1__Ferritin(5-167) protein
DIIKLLNEQVNKEMNSSNLYMSMSSWCYTHSLDGAGLFLFDHAAEEYEHAKKLIIFLNENNVPVQLTSISAPEHKFEGLTQIFQKAYEHEQHISESINNIVDHAIKSKDHATFNFLQWYVAEQHEEEVLFKDILDKIELIGNENHGLYLADQYVKGIAKSRKS

SEQ ID NO: 458 - protein, 162 aa, Helicobacter pylori
  REGION 1..162: note = Helicobacter pylori J99__AAD06160.1__Ferritin(5-166) protein
DIIKLLNEQVNKEMNSSNLYMSMSSWCYTHSLDGAGLFLFDHAAEEYEHAKKLIIFLNENNVPVQLTSISAPEHKFEGLTQIFQKAYEHEQHISESINNIVDHAIKSKDHATFNFLQWYVAEQHEEEVLFKDILDKIELIGNENHGLYLADQYVKGIAKSRK

SEQ ID NO: 459 - protein, 163 aa, synthetic construct
  REGION 1..163: note = Helicobacter pylori J99__AAD06160.1__Ferritin(5-167_N19Q) protein
DIIKLLNEQVNKEMQSSNLYMSMSSWCYTHSLDGAGLFLFDHAAEEYEHAKKLIIFLNENNVPVQLTSISAPEHKFEGLTQIFQKAYEHEQHISESINNIVDHAIKSKDHATFNFLQWYVAEQHEEEVLFKDILDKIELIGNENHGLYLADQYVKGIAKSRKS

SEQ ID NO: 460 - RNA, 489 nt, Helicobacter pylori
  misc_feature 1..489: note = Helicobacter pylori J99__AAD06160.1__Ferritin(5-167) CDS wt
  source 1..489: mol_type = mRNA
gacatcattaagttgctaaacgaacaagtgaataaggaaatgaactcttccaacttgtatatgagcatgagttcatggtgctatacccatagcttagatggcgcggggcttttcttgtttgaccatgcggctgaagaatacgagcatgctaaaaagcttattatcttcttgaatgaaaacaatgtgcctgtgcaattgaccagcatcagcgcgcctgagcataagtttgaaggtttgactcaaattttccaaaaagcctatgaacatgagcaacacatcagcgagtctattaacaatatcgtagatcacgccataaaaagcaaagatcatgcgactttcaatttcttgcaatggtatgtggctgaacagcatgaagaagaagtgcttttcaaggatattttggataaaattgagttgattggtaatgaaaaccatggcttgtatttagccgatcagtatgtcaaagggatcgctaaaagcaggaaatct

SEQ ID NO: 461 - RNA, 486 nt, Helicobacter pylori
  misc_feature 1..486: note = Helicobacter pylori J99__AAD06160.1__Ferritin(5-166) CDS wt
  source 1..486: mol_type = mRNA
gacatcattaagttgctaaacgaacaagtgaataaggaaatgaactcttccaacttgtatatgagcatgagttcatggtgctatacccatagcttagatggcgcggggcttttcttgtttgaccatgcggctgaagaatacgagcatgctaaaaagcttattatcttcttgaatgaaaacaatgtgcctgtgcaattgaccagcatcagcgcgcctgagcataagtttgaaggtttgactcaaattttccaaaaagcctatgaacatgagcaacacatcagcgagtctattaacaatatcgtagatcacgccataaaaagcaaagatcatgcgactttcaatttcttgcaatggtatgtggctgaacagcatgaagaagaagtgcttttcaaggatattttggataaaattgagttgattggtaatgaaaaccatggcttgtatttagccgatcagtatgtcaaagggatcgctaaaagcaggaaa

SEQ ID NO: 462 - RNA, 489 nt, synthetic construct
  misc_feature 1..489: note = Helicobacter pylori J99__AAD06160.1__Ferritin(5-167_N19Q) CDS wt
  source 1..489: mol_type = other RNA
gacatcattaagttgctaaacgaacaagtgaataaggaaatgcagtcttccaacttgtatatgagcatgagttcatggtgctatacccatagcttagatggcgcggggcttttcttgtttgaccatgcggctgaagaatacgagcatgctaaaaagcttattatcttcttgaatgaaaacaatgtgcctgtgcaattgaccagcatcagcgcgcctgagcataagtttgaaggtttgactcaaattttccaaaaagcctatgaacatgagcaacacatcagcgagtctattaacaatatcgtagatcacgccataaaaagcaaagatcatgcgactttcaatttcttgcaatggtatgtggctgaacagcatgaagaagaagtgcttttcaaggatattttggataaaattgagttgattggtaatgaaaaccatggcttgtatttagccgatcagtatgtcaaagggatcgctaaaagcaggaaatct

SEQ ID NO: 463 - RNA, 489 nt, synthetic construct
  misc_feature 1..489: note = Helicobacter pylori J99__AAD06160.1__Ferritin(5-167) CDS opt1
  source 1..489: mol_type = other RNA
gacatcatcaagctcctgaacgagcaggtcaacaaggagatgaactccagcaacctgtacatgtccatgagctcctggtgctacacccacagcctcgacggcgccgggctgttcctgttcgaccacgccgcggaggagtacgagcacgccaagaagctcatcatcttcctgaacgagaacaacgtgcccgtgcagctgacctccatcagcgccccggagcacaagttcgagggcctcacgcagatcttccagaaggcctacgagcacgagcagcacatctccgagagcatcaacaacatcgtggaccacgccatcaagtccaaggaccacgcgaccttcaacttcctgcagtggtacgtcgccgagcagcacgaggaggaggtgctgttcaaggacatcctcgacaagatcgagctgatcgggaacgagaaccacggcctgtacctcgccgaccagtacgtgaaggggatcgccaagagccgcaagtcc

SEQ ID NO: 464 - RNA, 486 nt, synthetic construct
  misc_feature 1..486: note = Helicobacter pylori J99__AAD06160.1__Ferritin(5-166) CDS opt1
  source 1..486: mol_type = other RNA
gacatcatcaagctcctgaacgagcaggtcaacaaggagatgaactccagcaacctgtacatgtccatgagctcctggtgctacacccacagcctcgacggcgccgggctgttcctgttcgaccacgccgcggaggagtacgagcacgccaagaagctcatcatcttcctgaacgagaacaacgtgcccgtgcagctgacctccatcagcgccccggagcacaagttcgagggcctcacgcagatcttccagaaggcctacgagcacgagcagcacatctccgagagcatcaacaacatcgtggaccacgccatcaagtccaaggaccacgcgaccttcaacttcctgcagtggtacgtcgccgagcagcacgaggaggaggtgctgttcaaggacatcctcgacaagatcgagctgatcgggaacgagaaccacggcctgtacctcgccgaccagtacgtgaaggggatcgccaagagccgcaag

SEQ ID NO: 465 - RNA, 489 nt, synthetic construct
  misc_feature 1..489: note = Helicobacter pylori J99__AAD06160.1__Ferritin(5-167_N19Q) CDS opt1
  source 1..489: mol_type = other RNA
gacatcatcaagctcctgaacgagcaggtcaacaaggagatgcagtccagcaacctgtacatgtccatgagctcctggtgctacacccacagcctcgacggcgccgggctgttcctgttcgaccacgccgcggaggagtacgagcacgccaagaagctcatcatcttcctgaacgagaacaacgtgcccgtgcagctgacctccatcagcgccccggagcacaagttcgagggcctcacgcagatcttccagaaggcctacgagcacgagcagcacatctccgagagcatcaacaacatcgtggaccacgccatcaagtccaaggaccacgcgaccttcaacttcctgcagtggtacgtcgccgagcagcacgaggaggaggtgctgttcaaggacatcctcgacaagatcgagctgatcgggaacgagaaccacggcctgtacctcgccgaccagtacgtgaaggggatcgccaagagccgcaagtcc

SEQ ID NO: 466 - RNA, 489 nt, synthetic construct
  misc_feature 1..489: note = Helicobacter pylori J99__AAD06160.1__Ferritin(5-167) CDS opt1
  source 1..489: mol_type = other RNA
gacatcatcaagctgctcaacgagcaggtcaacaaggagatgaacagctccaacctgtacatgagcatgtccagctggtgctacacccactccctggacggcgccggcctcttcctgttcgaccacgccgcggaggagtacgagcacgccaagaagctgatcatcttcctcaacgagaacaacgtgcccgtgcagctgaccagcatctccgccccggagcacaagttcgaggggctgacgcagatcttccagaaggcctacgagcacgagcagcacatcagcgagtccatcaacaacatcgtggaccacgccatcaagagcaaggaccacgcgaccttcaacttcctccagtggtacgtcgccgagcagcacgaggaggaggtgctgttcaaggacatcctggacaagatcgagctcatcgggaacgagaaccacggcctgtacctggccgaccagtacgtgaaggggatcgccaagtcccgcaagagc

SEQ ID NO: 467 - RNA, 486 nt, synthetic construct
  misc_feature 1..486: note = Helicobacter pylori J99__AAD06160.1__Ferritin(5-166) CDS opt1
  source 1..486: mol_type = other RNA
gacatcatcaagctgctcaacgagcaggtcaacaaggagatgaacagctccaacctgtacatgagcatgtccagctggtgctacacccactccctggacggcgccggcctcttcctgttcgaccacgccgcggaggagtacgagcacgccaagaagctgatcatcttcctcaacgagaacaacgtgcccgtgcagctgaccagcatctccgccccggagcacaagttcgaggggctgacgcagatcttccagaaggcctacgagcacgagcagcacatcagcgagtccatcaacaacatcgtggaccacgccatcaagagcaaggaccacgcgaccttcaacttcctccagtggtacgtcgccgagcagcacgaggaggaggtgctgttcaaggacatcctggacaagatcgagctcatcgggaacgagaaccacggcctgtacctggccgaccagtacgtgaaggggatcgccaagtcccgcaag

SEQ ID NO: 468 - RNA, 489 nt, synthetic construct
  misc_feature 1..489: note = Helicobacter pylori J99__AAD06160.1__Ferritin(5-167_N19Q) CDS opt1
  source 1..489: mol_type = other RNA
gacatcatcaagctgctcaacgagcaggtcaacaaggagatgcagagctccaacctgtacatgagcatgtccagctggtgctacacccactccctggacggcgccggcctcttcctgttcgaccacgccgcggaggagtacgagcacgccaagaagctgatcatcttcctcaacgagaacaacgtgcccgtgcagctgaccagcatctccgccccggagcacaagttcgaggggctgacgcagatcttccagaaggcctacgagcacgagcagcacatcagcgagtccatcaacaacatcgtggaccacgccatcaagagcaaggaccacgcgaccttcaacttcctccagtggtacgtcgccgagcagcacgaggaggaggtgctgttcaaggacatcctggacaagatcgagctcatcgggaacgagaaccacggcctgtacctggccgaccagtacgtgaaggggatcgccaagtcccgcaagagc

SEQ ID NO: 469 - RNA, 489 nt, synthetic construct
  misc_feature 1..489: note = Helicobacter pylori J99__AAD06160.1__Ferritin(5-167) CDS opt3
  source 1..489: mol_type = other RNA
gacatcattaagctgctcaacgaacaggtgaataaagagatgaacagctccaatctttacatgtctatgtcaagttggtgctatacccacagcctggatggcgccgggttgttcttatttgaccatgctgcagaggaatacgagcacgccaagaaactgataatcttcctaaacgaaaataacgtccccgttcaactcacatccatttctgcgcctgagcataagtttgagggactgactcagatcttccagaaggcttatgaacacgagcagcatatttcggaatcaatcaataacatagtggatcacgccatcaaaagcaaggaccacgcaacgtttaatttccttcaatggtacgtagccgagcagcatgaggaagaggtgctgtttaaagatattttggacaagatcgaactcattggtaacgagaatcacggcctgtatctggctgatcagtacgtcaaagggatcgcaaagagtagaaaatcc

SEQ ID NO: 470 - RNA, 486 nt, synthetic construct
  misc_feature 1..486: note = Helicobacter pylori J99__AAD06160.1__Ferritin(5-166) CDS opt3
  source 1..486: mol_type = other RNA
gacatcattaagctgctcaacgaacaggtgaataaagagatgaacagctccaatctttacatgtctatgtcaagttggtgctatacccacagcctggatggcgccgggttgttcttatttgaccatgctgcagaggaatacgagcacgccaagaaactgataatcttcctaaacgaaaataacgtccccgttcaactcacatccatttctgcgcctgagcataagtttgagggactgactcagatcttccagaaggcttatgaacacgagcagcatatttcggaatcaatcaataacatagtggatcacgccatcaaaagcaaggaccacgcaacgtttaatttccttcaatggtacgtagccgagcagcatgaggaagaggtgctgtttaaagatattttggacaagatcgaactcattggtaacgagaatcacggcctgtatctggctgatcagtacgtcaaagggatcgcaaagagtagaaaa

SEQ ID NO: 471 - RNA, 489 nt, synthetic construct
  misc_feature 1..489: note = Helicobacter pylori J99__AAD06160.1__Ferritin(5-167_N19Q) CDS opt3
  source 1..489: mol_type = other RNA
gacatcattaagctgctcaacgaacaggtgaataaagagatgcaaagctccaacctttacatgtctatgtcaagttggtgctatacccacagcctggatggcgccgggttgttcttatttgaccatgctgcagaggaatacgagcacgccaagaaactgataatcttcctaaatgaaaacaatgtccccgttcagctcacatccatttctgcgcctgagcataagtttgagggactgactcagatcttccagaaggcttatgaacacgagcaacatatttcggaatcaatcaacaatatagtggatcacgccatcaaaagcaaggaccacgcaacgtttaacttccttcagtggtacgtagccgagcagcatgaggaagaggtgctgtttaaagatattttggacaagatcgaactcattggtaatgagaaccacggcctgtatctggctgatcagtacgtcaaagggatcgcaaagagtagaaaatcc

SEQ ID NO: 472 - RNA, 489 nt, synthetic construct
  misc_feature 1..489: note = Helicobacter pylori J99__AAD06160.1__Ferritin(5-167) CDS opt4
  source 1..489: mol_type = other RNA
gacatcatcaagctgctgaacgagcaggtgaacaaggagatgaacagcagcaacctgtacatgagcatgagcagctggtgctacacccacagcctggacggcgccggcctgttcctgttcgaccacgccgccgaggagtacgagcacgccaagaagctgatcatcttcctgaacgagaacaacgtgcccgtgcagctgaccagcatcagcgcccccgagcacaagttcgagggcctgacccagatcttccagaaggcctacgagcacgagcagcacatcagcgagagcatcaacaacatcgtggaccacgccatcaagagcaaggaccacgccaccttcaacttcctgcagtggtacgtggccgagcagcacgaggaggaggtgctgttcaaggacatcctggacaagatcgagctgatcggcaacgagaaccacggcctgtacctggccgaccagtacgtgaagggcatcgccaagagcagaaagagc

SEQ ID NO: 473 - RNA, 486 nt, synthetic construct
  misc_feature 1..486: note = Helicobacter pylori J99__AAD06160.1__Ferritin(5-166) CDS opt4
  source 1..486: mol_type = other RNA
gacatcatcaagctgctgaacgagcaggtgaacaaggagatgaacagcagcaacctgtacatgagcatgagcagctggtgctacacccacagcctggacggcgccggcctgttcctgttcgaccacgccgccgaggagtacgagcacgccaagaagctgatcatcttcctgaacgagaacaacgtgcccgtgcagctgaccagcatcagcgcccccgagcacaagttcgagggcctgacccagatcttccagaaggcctacgagcacgagcagcacatcagcgagagcatcaacaacatcgtggaccacgccatcaagagcaaggaccacgccaccttcaacttcctgcagtggtacgtggccgagcagcacgaggaggaggtgctgttcaaggacatcctggacaagatcgagctgatcggcaacgagaaccacggcctgtacctggccgaccagtacgtgaagggcatcgccaagagcagaaag

SEQ ID NO: 474 - RNA, 489 nt, synthetic construct
  misc_feature 1..489: note = Helicobacter pylori J99__AAD06160.1__Ferritin(5-167_N19Q) CDS opt4
  source 1..489: mol_type = other RNA
gacatcatcaagctgctgaacgagcaggtgaacaaggagatgcagagcagcaacctgtacatgagcatgagcagctggtgctacacccacagcctggacggcgccggcctgttcctgttcgaccacgccgccgaggagtacgagcacgccaagaagctgatcatcttcctgaacgagaacaacgtgcccgtgcagctgaccagcatcagcgcccccgagcacaagttcgagggcctgacccagatcttccagaaggcctacgagcacgagcagcacatcagcgagagcatcaacaacatcgtggaccacgccatcaagagcaaggaccacgccaccttcaacttcctgcagtggtacgtggccgagcagcacgaggaggaggtgctgttcaaggacatcctggacaagatcgagctgatcggcaacgagaaccacggcctgtacctggccgaccagtacgtgaagggcatcgccaagagcagaaagagc

SEQ ID NO: 475 - RNA, 489 nt, synthetic construct
  misc_feature 1..489: note = Helicobacter pylori J99__AAD06160.1__Ferritin(5-167) CDS opt5
  source 1..489: mol_type = other RNA
gacatcattaagctgctcaacgaacaggtgaataaagagatgaacagctccaatctgtacatgtctatgagctcctggtgctatacccactctcttgatggcgccgggctgttcctctttgaccatgctgccgaggaatacgagcacgcgaagaaactgatcattttccttaacgaaaataacgtccccgttcaactgacaagcatctccgctcctgagcataagtttgagggactcacgcagattttccagaaagcctatgaacacgagcagcatatctctgaaagcatcaataacattgtggatcacgccatcaagtccaaggaccacgctacctttaatttcctgcaatggtacgtggccgagcagcatgaggaagaggtcctgtttaaagatattctcgacaagatcgaactgattggcaacgagaatcacgggctttatctggctgatcagtacgtgaaaggaatcgccaagagcagaaaatct

SEQ ID NO: 476 - RNA, 486 nt, synthetic construct
  misc_feature 1..486: note = Helicobacter pylori J99__AAD06160.1__Ferritin(5-166) CDS opt5
  source 1..486: mol_type = other RNA
gacatcattaagctgctcaacgaacaggtgaataaagagatgaacagctccaatctgtacatgtctatgagctcctggtgctatacccactctcttgatggcgccgggctgttcctctttgaccatgctgccgaggaatacgagcacgcgaagaaactgatcattttccttaacgaaaataacgtccccgttcaactgacaagcatctccgctcctgagcataagtttgagggactcacgcagattttccagaaagcctatgaacacgagcagcatatctctgaaagcatcaataacattgtggatcacgccatcaagtccaaggaccacgctacctttaatttcctgcaatggtacgtggccgagcagcatgaggaagaggtcctgtttaaagatattctcgacaagatcgaactgattggcaacgagaatcacgggctttatctggctgatcagtacgtgaaaggaatcgccaagagcagaaaa

SEQ ID NO: 477 - RNA, 489 nt, synthetic construct
  misc_feature 1..489: note = Helicobacter pylori J99__AAD06160.1__Ferritin(5-167_N19Q) CDS opt5
  source 1..489: mol_type = other RNA
gacatcattaagctgctcaacgaacaggtgaataaagagatgcaaagctccaacctgtacatgtctatgagctcctggtgctatacccactctcttgatggcgccgggctgttcctctttgaccatgctgccgaggaatacgagcacgcgaagaaactgatcattttccttaatgaaaacaatgtccccgttcagctgacaagcatctccgctcctgagcataagtttgagggactcacgcagattttccagaaagcctatgaacacgagcaacatatctctgaaagcatcaacaatattgtggatcacgccatcaagtccaaggaccacgctacctttaacttcctgcagtggtacgtggccgagcagcatgaggaagaggtcctgtttaaagatattctcgacaagatcgaactgattggcaatgagaaccacgggctttatctggctgatcagtacgtgaaaggaatcgccaagagcagaaaatct

SEQ ID NO: 478 - protein, 57 aa, Influenza A virus
  REGION 1..57: note = FLUAV A/Netherlands/602/2009(H1N1)__ACQ45338.1__TMdomain-HA(510-5 66) protein
AKLNREEIDGVKLESTRIYQILAIYSTVASSLVLVVSLGAISFWMCSNGSLQCRICI

SEQ ID NO: 479 - protein, 17 aa, Human immunodeficiency virus 1
  REGION 1..17: note = Human immunodeficiency virus 1__BAF32550.1__TMdomain-Env(19-35) protein
LILGLVIICNASNNLWV

SEQ ID NO: 480 - protein, 22 aa, Human immunodeficiency virus 1
  REGION 1..22: note = Human immunodeficiency virus 1__BAF32550.1__TMdomain-Env(515-536) protein
GIGAMIFGFLGAAGSTMGAASI

SEQ ID NO: 481 - protein, 23 aa, Human immunodeficiency virus 1
  REGION 1..23: note = Human immunodeficiency virus 1__BAF32550.1__TMdomain-Env(680-702) protein
LWYIRLFIMIVGGLIGLRIIFAV

SEQ ID NO: 482 - protein, 23 aa, Equine infectious anemia virus
  REGION 1..23: note = Equine infectious anemia virus__AAC03762.1__TMdomain-Env(450-472) protein
AIVAAIVAATAIAASATMSYVAL

SEQ ID NO: 483 - protein, 23 aa, Equine infectious anemia virus
  REGION 1..23: note = Equine infectious anemia virus__AAC03762.1__TMdomain-Env(614-636) protein
WIPGLGASIIKYIVMFLLIYLLL

SEQ ID NO: 484 - protein, 22 aa, Equine infectious anemia virus
  REGION 1..22: note = Equine infectious anemia virus__AAC03762.1__TMdomain-Env(798-819) protein
LFWGLVIIVGRIAGYGLRGLAV

SEQ ID NO: 485 - protein, 23 aa, Murine leukemia virus
  REGION 1..23: note = Murine leukemia virus__AAA46526.1__TMdomain-Env(601-623) protein
WFTTLISTIMGPLIVLLLILLLG

SEQ ID NO: 486 - protein, 23 aa, Mouse mammary tumor virus
  REGION 1..23: note = Mouse mammary tumor virus__BAA03768.1__TMdomain-Env(457-479) protein
FVAAIILGISALIAIITSFAVAT

SEQ ID NO: 487 - protein, 23 aa, Mouse mammary tumor virus
  REGION 1..23: note = Mouse mammary tumor virus__NP_056883.1__TMdomain-Env(624-646) protein
YFIFIGVGALLLVIVLMIFPIVF

SEQ ID NO: 488 - protein, 23 aa, Vesicular stomatitis virus
  REGION 1..23: note = Vesicular stomatitis virus__CAA24525.1__TMdomain-G(477-499) protein
AVIIGFVILMFLIKLIGVLSSLF

SEQ ID NO: 489 - protein, 20 aa, Rabies virus
  REGION 1..20: note = Rabies virus__AEV43288.1__TMdomain-G(460-479) protein
VLMGAGVLTALMLMIFLMTC

SEQ ID NO: 490 - RNA, 171 nt, Influenza A virus
  misc_feature 1..171: note = FLUAV A/Netherlands/602/2009(H1N1)__ACQ45338.1__TMdomain-HA(510-5 66) CDS wt
  source 1..171: mol_type = mRNA
gcaaaattaaacagagaagaaatagatggggtaaagctggaatcaacaaggatttaccagattttggcgatctattcaactgtcgccagttcattggtactggtagtctccctgggggcaatcagtttctggatgtgctctaatgggtctctacagtgtagaatatgtatt

SEQ ID NO: 491 - RNA, 171 nt, synthetic construct
  misc_feature 1..171: note = FLUAV A/Netherlands/602/2009(H1N1)__ACQ45338.1__TMdomain-HA(510-5 66) CDS opt1
  source 1..171: mol_type = other RNA
gccaagctgaaccgcgaggagatcgacggcgtgaagctcgagtccacgcggatctaccagatcctggcgatctacagcaccgtcgccagctccctggtgctcgtggtcagcctgggggccatctccttctggatgtgcagcaacggctccctgcagtgccgcatctgcatc

SEQ ID NO: 492 - RNA, 171 nt, synthetic construct
  misc_feature 1..171: note = FLUAV A/Netherlands/602/2009(H1N1)__ACQ45338.1__TMdomain-HA(510-5 66) CDS opt1
  source 1..171: mol_type = other RNA
gccaagctgaaccgcgaggagatcgacggcgtgaagctcgagagcacccggatctaccagatcctggccatctactccaccgtcgcgagctccctggtgctcgtggtcagcctgggggccatctccttctggatgtgcagcaacggctccctgcagtgccgcatctgcatc

SEQ ID NO: 493 - RNA, 171 nt, synthetic construct
  misc_feature 1..171: note = FLUAV A/Netherlands/602/2009(H1N1)__ACQ45338.1__TMdomain-HA(510-5 66) CDS opt3
  source 1..171: mol_type = other RNA
gccaagctgaacagagaggaaatcgacggcgtgaaactcgagagcaccaggatttaccagatacttgctatctattccacagtcgcatcttcactggttttggtggtaagtttaggggccattagcttctggatgtgctccaatggatctctgcaatgtcggatctgcatt

SEQ ID NO: 494 - RNA, 171 nt, synthetic construct
  misc_feature 1..171: note = FLUAV A/Netherlands/602/2009(H1N1)__ACQ45338.1__TMdomain-HA(510-5 66) CDS opt4
  source 1..171: mol_type = other RNA
gccaagctgaacagagaggagatcgacggcgtgaagctggagagcaccagaatctaccagatcctggccatctacagcaccgtggccagcagcctggtgctggtggtgagcctgggcgccatcagcttctggatgtgcagcaacggcagcctgcagtgcagaatctgcatc

SEQ ID NO: 495 - RNA, 171 nt, synthetic construct
  misc_feature 1..171: note = FLUAV A/Netherlands/602/2009(H1N1)__ACQ45338.1__TMdomain-HA(510-5 66) CDS opt5
  source 1..171: mol_type = other RNA
gccaagctgaacagagaggaaatcgacggcgtgaaactcgagagcacccggatttaccagatcctggctatttattccacagtcgcctctagccttgttctggtggtgtccctcggggcgatctctttctggatgtgcagcaatggatccctgcaatgtcgcatttgcatc

SEQ ID NO: 496 - protein, 241 aa, Escherichia coli; identical to SEQ ID NO: 317
  REGION 1..241: note Artificial____Ec(J96)-FimC(1-36)_Ec(J96)-FimC(37-241) protein

SEQ ID NO: 497 - protein, 223 aa, synthetic construct
  REGION 1..223: note = Artificial____HsIgE(1-18)_Ec(J96)-FimC(37-241) protein
MDWTWILFLVAAATRVHSGVALGATRVIYPAGQKQVQLAVTNNDENSTYLIQSWVENADGVKDGRFIVTPPLFAMKGKKENTLRILDATNNQLPQDRESLFWMNVKAIPSMDKSKLTENTLQLAIISRIKLYYRPAKLALPPDQAAEKLRFRRSANSLTLINPTPYYLTVTELNAGTRVLENALVPPMGESTVKLPSDAGSNITYRTINDYGALTPKMTGVME

SEQ ID NO: 498 - protein, 300 aa, Escherichia coli; identical to SEQ ID NO: 177
  REGION 1..300: note Artificial____Ec(J96)-FimH(1-21)_Ec(J96)-FimH(22-300) protein

SEQ ID NO: 499 - protein, 297 aa, synthetic construct
  REGION 1..297: note = Artificial____HsIgE(1-18)_Ec(J96)-FimH(22-300) protein
MDWTWILFLVAAATRVHSFACKTANGTAIPIGGGSANVYVNLAPVVNVGQNLVVDLSTQIFCHNDYPETITDYVTLQRGSAYGGVLSNFSGTVKYSGSSYPFPTTSETPRVVYNSRTDKPWPVALYLTPVSSAGGVAIKAGSLIAVLILRQTNNYNSDDFQFVWNIYANNDVVVPTGGCDVSARDVTVTLPDYPGSVPIPLTVYCAKSQNLGYYLSGTTADAGNSIFTNTASFSPAQGVGVQLTRNGTIIPANNTVSLGAVGTSAVSLGLTANYARTGGQVTAGNVQSIIGVTFVYQ

SEQ ID NO: 500 - protein, 299 aa, synthetic construct
  REGION 1..299: note = Artificial____MmIgK(1-20)_Ec(J96)-FimH(22-300) protein
METDTLLLWVLLLWVPGSTGFACKTANGTAIPIGGGSANVYVNLAPVVNVGQNLVVDLSTQIFCHNDYPETITDYVTLQRGSAYGGVLSNFSGTVKYSGSSYPFPTTSETPRVVYNSRTDKPWPVALYLTPVSSAGGVAIKAGSLIAVLILRQTNNYNSDDFQFVWNIYANNDVVVPTGGCDVSARDVTVTLPDYPGSVPIPLTVYCAKSQNLGYYLSGTTADAGNSIFTNTASFSPAQGVGVQLTRNGTIIPANNTVSLGAVGTSAVSLGLTANYARTGGQVTAGNVQSIIGVTFVYQ

SEQ ID NO: 501 - protein, 319 aa, synthetic construct
  REGION 1..319: note Artificial____Ec(J96)-FimH(1-21)_Ec(J96)-FimH(22-300)_Linke r-PGDGN_Ec(J96)-FimG(24-37) protein
MKRVITLFAVLLMGWSVNAWSFACKTANGTAIPIGGGSANVYVNLAPVVNVGQNLVVDLSTQIFCHNDYPETITDYVTLQRGSAYGGVLSNFSGTVKYSGSSYPFPTTSETPRVVYNSRTDKPWPVALYLTPVSSAGGVAIKAGSLIAVLILRQTNNYNSDDFQFVWNIYANNDVVVPTGGCDVSARDVTVTLPDYPGSVPIPLTVYCAKSQNLGYYLSGTTADAGNSIFTNTASFSPAQGVGVQLTRNGTIIPANNTVSLGAVGTSAVSLGLTANYARTGGQVTAGNVQSIIGVTFVYQPGDGNADVTITVNGKVVAK

SEQ ID NO: 502 - protein, 316 aa, synthetic construct
  REGION 1..316: note Artificial____HsIgE(1-18)_Ec(J96)-FimH(22-300)_Linker-PGDGN _Ec(J96)-FimG(24-37) protein
MDWTWILFLVAAATRVHSFACKTANGTAIPIGGGSANVYVNLAPVVNVGQNLVVDLSTQIFCHNDYPETITDYVTLQRGSAYGGVLSNFSGTVKYSGSSYPFPTTSETPRVVYNSRTDKPWPVALYLTPVSSAGGVAIKAGSLIAVLILRQTNNYNSDDFQFVWNIYANNDVVVPTGGCDVSARDVTVTLPDYPGSVPIPLTVYCAKSQNLGYYLSGTTADAGNSIFTNTASFSPAQGVGVQLTRNGTIIPANNTVSLGAVGTSAVSLGLTANYARTGGQVTAGNVQSIIGVTFVYQPGDGNADVTITVNGKVVAK

SEQ ID NO: 503 - protein, 318 aa, synthetic construct
  REGION 1..318: note Artificial____HsIgE(1-18)_Ec(J96)-FimH(22-300)_Linker-G4SGG _Ec(J96)-FimG(24-37) protein
MDWTWILFLVAAATRVHSFACKTANGTAIPIGGGSANVYVNLAPVVNVGQNLVVDLSTQIFCHNDYPETITDYVTLQRGSAYGGVLSNFSGTVKYSGSSYPFPTTSETPRVVYNSRTDKPWPVALYLTPVSSAGGVAIKAGSLIAVLILRQTNNYNSDDFQFVWNIYANNDVVVPTGGCDVSARDVTVTLPDYPGSVPIPLTVYCAKSQNLGYYLSGTTADAGNSIFTNTASFSPAQGVGVQLTRNGTIIPANNTVSLGAVGTSAVSLGLTANYARTGGQVTAGNVQSIIGVTFVYQGGGGSGGADVTITVNGKVVAK

SEQ ID NO: 504 - protein, 318 aa, synthetic construct
  REGION 1..318: note Artificial____MmIgK(1-20)_Ec(J96)-FimH(22-300)_Linker-PGDGN _Ec(J96)-FimG(24-37) protein
METDTLLLWVLLLWVPGSTGFACKTANGTAIPIGGGSANVYVNLAPVVNVGQNLVVDLSTQIFCHNDYPETITDYVTLQRGSAYGGVLSNFSGTVKYSGSSYPFPTTSETPRVVYNSRTDKPWPVALYLTPVSSAGGVAIKAGSLIAVLILRQTNNYNSDDFQFVWNIYANNDVVVPTGGCDVSARDVTVTLPDYPGSVPIPLTVYCAKSQNLGYYLSGTTADAGNSIFTNTASFSPAQGVGVQLTRNGTIIPANNTVSLGAVGTSAVSLGLTANYARTGGQVTAGNVQSIIGVTFVYQPGDGNADVTITVNGKVVAK

SEQ ID NO: 505 - protein, 318 aa, synthetic construct
  REGION 1..318: note Artificial____MmIgK(1-20)_Ec(536)-FimH(22-300)_Linker-PGDGN _Ec(J96)-FimG(24-37) protein
METDTLLLWVLLLWVPGSTGFACKTANGTAIPIGGGSANVYVNLAPAVNVGQNLVVDLSTQIFCHNDYPETITDYVTLQRGSAYGGVLSSFSGTVKYNGSSYPFPTTSETPRVVYNSRTDKPWPVALYLTPVSSAGGVAIKAGSLIAVLILRQTNNYNSDDFQFVWNIYANNDVVVPTGGCDVSARDVTVTLPDYPGSVPIPLTVYCAKSQNLGYYLSGTTADAGNSIFTNTASFSPAQGVGVQLTRNGTIIPANNTVSLGAVGTSAVSLGLTANYARTGGQVTAGNVQSIIGVTFVYQPGDGNADVTITVNGKVVAK

SEQ ID NO: 506 - protein, 326 aa, synthetic construct
  REGION 1..326: note Artificial____HsIgE(1-18)_Ec(J96)-FimH(22-300)_Linker-(G4S) 3_Ec(J96)-FimC(135-148) protein
MDWTWILFLVAAATRVHSFACKTANGTAIPIGGGSANVYVNLAPVVNVGQNLVVDLSTQIFCHNDYPETITDYVTLQRGSAYGGVLSNFSGTVKYSGSSYPFPTTSETPRVVYNSRTDKPWPVALYLTPVSSAGGVAIKAGSLIAVLILRQTNNYNSDDFQFVWNIYANNDVVVPTGGCDVSARDVTVTLPDYPGSVPIPLTVYCAKSQNLGYYLSGTTADAGNSIFTNTASFSPAQGVGVQLTRNGTIIPANNTVSLGAVGTSAVSLGLTANYARTGGQVTAGNVQSIIGVTFVYQGGGGSGGGGSGGGGSTENTLQLAIISRIK

SEQ ID NO: 507 - protein, 467 aa, synthetic construct
  REGION 1..467: note Artificial____LumSynth(1-154_C37A_N102D)_Linker(GGS)4-GGG_E c(J96)-FimH(22-300)_Linker-PGDGN_Ec(J96)-FimG(24-37) protein
MQIYEGKLTAEGLRFGIVASRFNHALVDRLVEGAIDAIVRHGGREEDITLVRVPGSWEIPVAAGELARKEDIDAVIAIGVLIRGATPHFDYIASEVSKGLADLSLELRKPITFGVITADTLEQAIERAGTKHGNKGWEAALSAIEMANLFKSLRGGSGGSGGSGGSGGGFACKTANGTAIPIGGGSANVYVNLAPVVNVGQNLVVDLSTQIFCHNDYPETITDYVTLQRGSAYGGVLSNFSGTVKYSGSSYPFPTTSETPRVVYNSRTDKPWPVALYLTPVSSAGGVAIKAGSLIAVLILRQTNNYNSDDFQFVWNIYANNDVVVPTGGCDVSARDVTVTLPDYPGSVPIPLTVYCAKSQNLGYYLSGTTADAGNSIFTNTASFSPAQGVGVQLTRNGTIIPANNTVSLGAVGTSAVSLGLTANYARTGGQVTAGNVQSIIGVTFVYQPGDGNADVTITVNGKVVAK

SEQ ID NO: 508 - protein, 473 aa, synthetic construct
  REGION 1..473: note Artificial____HsIgE(1-18)_Ec(J96)-FimH(22-300)_Linker-PGDGN _Ec(J96)-FimG(24-37)_Linker-SGG_LumSynth(1-154_C37A_N102D) protein
MDWTWILFLVAAATRVHSFACKTANGTAIPIGGGSANVYVNLAPVVNVGQNLVVDLSTQIFCHNDYPETITDYVTLQRGSAYGGVLSNFSGTVKYSGSSYPFPTTSETPRVVYNSRTDKPWPVALYLTPVSSAGGVAIKAGSLIAVLILRQTNNYNSDDFQFVWNIYANNDVVVPTGGCDVSARDVTVTLPDYPGSVPIPLTVYCAKSQNLGYYLSGTTADAGNSIFTNTASFSPAQGVGVQLTRNGTIIPANNTVSLGAVGTSAVSLGLTANYARTGGQVTAGNVQSIIGVTFVYQPGDGNADVTITVNGKVVAKSGGMQIYEGKLTAEGLRFGIVASRFNHALVDRLVEGAIDAIVRHGGREEDITLVRVPGSWEIPVAAGELARKEDIDAVIAIGVLIRGATPHFDYIASEVSKGLADLSLELRKPITFGVITADTLEQAIERAGTKHGNKGWEAALSAIEMANLFKSLR

SEQ ID NO: 509 - protein, 482 aa, synthetic construct
  REGION 1..482: note Artificial____HsIgE(1-18)_Ec(J96)-FimH(22-300)_Linker-PGDGN _Ec(J96)-FimG(24-37)_Linker-SGG_Ferritin(5-167_N19Q) protein
MDWTWILFLVAAATRVHSFACKTANGTAIPIGGGSANVYVNLAPVVNVGQNLVVDLSTQIFCHNDYPETITDYVTLQRGSAYGGVLSNFSGTVKYSGSSYPFPTTSETPRVVYNSRTDKPWPVALYLTPVSSAGGVAIKAGSLIAVLILRQTNNYNSDDFQFVWNIYANNDVVVPTGGCDVSARDVTVTLPDYPGSVPIPLTVYCAKSQNLGYYLSGTTADAGNSIFTNTASFSPAQGVGVQLTRNGTIIPANNTVSLGAVGTSAVSLGLTANYARTGGQVTAGNVQSIIGVTFVYQPGDGNADVTITVNGKVVAKSGGDIIKLLNEQVNKEMQSSNLYMSMSSWCYTHSLDGAGLFLFDHAAEEYEHAKKLIIFLNENNVPVQLTSISAPEHKFEGLTQIFQKAYEHEQHISESINNIVDHAIKSKDHATFNFLQWYVAEQHEEEVLFKDILDKIELIGNENHGLYLADQYVKGIAKSRKS

SEQ ID NO: 510 - protein, 492 aa, synthetic construct
  REGION 1..492: note Artificial____MmIgK(1-20)_Ec(J96)-FimH(22-300)_Linker-PGDGN _Ec(J96)-FimG(24-37)_Linker-(GGS)4_Ferritin(5-166) protein
METDTLLLWVLLLWVPGSTGFACKTANGTAIPIGGGSANVYVNLAPVVNVGQNLVVDLSTQIFCHNDYPETITDYVTLQRGSAYGGVLSNFSGTVKYSGSSYPFPTTSETPRVVYNSRTDKPWPVALYLTPVSSAGGVAIKAGSLIAVLILRQTNNYNSDDFQFVWNIYANNDVVVPTGGCDVSARDVTVTLPDYPGSVPIPLTVYCAKSQNLGYYLSGTTADAGNSIFTNTASFSPAQGVGVQLTRNGTIIPANNTVSLGAVGTSAVSLGLTANYARTGGQVTAGNVQSIIGVTFVYQPGDGNADVTITVNGKVVAKGGSGGSGGSGGSDIIKLLNEQVNKEMNSSNLYMSMSSWCYTHSLDGAGLFLFDHAAEEYEHAKKLIIFLNENNVPVQLTSISAPEHKFEGLTQIFQKAYEHEQHISESINNIVDHAIKSKDHATFNFLQWYVAEQHEEEVLFKDILDKIELIGNENHGLYLADQYVKGIAKSRK

SEQ ID NO: 511 - protein, 373 aa, synthetic construct
  REGION 1..373: note Artificial____HsIgE(1-18)_Ec(J96)-FimH(22-300)_Linker-PGDGN _Ec(J96)-FimG(24-37)_TMdomain-HA(510-566) protein
MDWTWILFLVAAATRVHSFACKTANGTAIPIGGGSANVYVNLAPVVNVGQNLVVDLSTQIFCHNDYPETITDYVTLQRGSAYGGVLSNFSGTVKYSGSSYPFPTTSETPRVVYNSRTDKPWPVALYLTPVSSAGGVAIKAGSLIAVLILRQTNNYNSDDFQFVWNIYANNDVVVPTGGCDVSARDVTVTLPDYPGSVPIPLTVYCAKSQNLGYYLSGTTADAGNSIFTNTASFSPAQGVGVQLTRNGTIIPANNTVSLGAVGTSAVSLGLTANYARTGGQVTAGNVQSIIGVTFVYQPGDGNADVTITVNGKVVAKAKLNREEIDGVKLESTRIYQILAIYSTVASSLVLVVSLGAISFWMCSNGSLQCRICI

SEQ ID NO: 512 - protein, 484 aa, synthetic construct
  REGION 1..484: note Artificial____HsIgE(1-18)_LumSynth(1-154_C37A_N102D)_Linker (GGS)4-GGG_Ec(J96)-FimH(22-300)_Linker-PGDGN_Ec(J96)-FimG(2 4-37) protein
MDWTWILFLVAAATRVHSQIYEGKLTAEGLRFGIVASRFNHALVDRLVEGAIDAIVRHGGREEDITLVRVPGSWEIPVAAGELARKEDIDAVIAIGVLIRGATPHFDYIASEVSKGLADLSLELRKPITFGVITADTLEQAIERAGTKHGNKGWEAALSAIEMANLFKSLRGGSGGSGGSGGSGGGFACKTANGTAIPIGGGSANVYVNLAPVVNVGQNLVVDLSTQIFCHNDYPETITDYVTLQRGSAYGGVLSNFSGTVKYSGSSYPFPTTSETPRVVYNSRTDKPWPVALYLTPVSSAGGVAIKAGSLIAVLILRQTNNYNSDDFQFVWNIYANNDVVVPTGGCDVSARDVTVTLPDYPGSVPIPLTVYCAKSQNLGYYLSGTTADAGNSIFTNTASFSPAQGVGVQLTRNGTIIPANNTVSLGAVGTSAVSLGLTANYARTGGQVTAGNVQSIIGVTFVYQPGDGNADVTITVNGKVVAK

SEQ ID NO: 513 - protein, 473 aa, synthetic construct
  REGION 1..473: note Artificial____HsIgE(1-18)_Ec(J96)-FimH(22-300_N28S_N91S_N24 9Q)_Linker-PGDGN_Ec(J96)-FimG(24-37)_Linker-SGG_LumSynth(1- 154_C37A_N102D) protein
MDWTWILFLVAAATRVHSFACKTASGTAIPIGGGSANVYVNLAPVVNVGQNLVVDLSTQIFCHNDYPETITDYVTLQRGSAYGGVLSSFSGTVKYSGSSYPFPTTSETPRVVYNSRTDKPWPVALYLTPVSSAGGVAIKAGSLIAVLILRQTNNYNSDDFQFVWNIYANNDVVVPTGGCDVSARDVTVTLPDYPGSVPIPLTVYCAKSQNLGYYLSGTTADAGNSIFTNTASFSPAQGVGVQLTRQGTIIPANNTVSLGAVGTSAVSLGLTANYARTGGQVTAGNVQSIIGVTFVYQPGDGNADVTITVNGKVVAKSGGMQIYEGKLTAEGLRFGIVASRFNHALVDRLVEGAIDAIVRHGGREEDITLVRVPGSWEIPVAAGELARKEDIDAVIAIGVLIRGATPHFDYIASEVSKGLADLSLELRKPITFGVITADTLEQAIERAGTKHGNKGWEAALSAIEMANLFKSLR

SEQ ID NO: 514 - protein, 473 aa, synthetic construct
  REGION 1..473: note Artificial____HsIgE(1-18)_Ec(J96)-FimH(22-300_N28S_N91S_N24 9Q_N256D)_Linker-PGDGN_Ec(J96)-FimG(24-37)_Linker-SGG_LumSy nth(1-154_C37A_N102D) protein
MDWTWILFLVAAATRVHSFACKTASGTAIPIGGGSANVYVNLAPVVNVGQNLVVDLSTQIFCHNDYPETITDYVTLQRGSAYGGVLSSFSGTVKYSGSSYPFPTTSETPRVVYNSRTDKPWPVALYLTPVSSAGGVAIKAGSLIAVLILRQTNNYNSDDFQFVWNIYANNDVVVPTGGCDVSARDVTVTLPDYPGSVPIPLTVYCAKSQNLGYYLSGTTADAGNSIFTNTASFSPAQGVGVQLTRQGTIIPADNTVSLGAVGTSAVSLGLTANYARTGGQVTAGNVQSIIGVTFVYQPGDGNADVTITVNGKVVAKSGGMQIYEGKLTAEGLRFGIVASRFNHALVDRLVEGAIDAIVRHGGREEDITLVRVPGSWEIPVAAGELARKEDIDAVIAIGVLIRGATPHFDYIASEVSKGLADLSLELRKPITFGVITADTLEQAIERAGTKHGNKGWEAALSAIEMANLFKSLR

SEQ ID NO: 515 - protein, 473 aa, synthetic construct
  REGION 1..473: note Artificial____HsIgE(1-18)_Ec(J96)-FimH(22-300_N28S_V48C_L55 C_N91S_N249Q)_Linker-PGDGN_Ec(J96)-FimG(24-37)_Linker-SGG_L umSynth(1-154_C37A_N102D) protein
MDWTWILFLVAAATRVHSFACKTASGTAIPIGGGSANVYVNLAPCVNVGQNCVVDLSTQIFCHNDYPETITDYVTLQRGSAYGGVLSSFSGTVKYSGSSYPFPTTSETPRVVYNSRTDKPWPVALYLTPVSSAGGVAIKAGSLIAVLILRQTNNYNSDDFQFVWNIYANNDVVVPTGGCDVSARDVTVTLPDYPGSVPIPLTVYCAKSQNLGYYLSGTTADAGNSIFTNTASFSPAQGVGVQLTRQGTIIPANNTVSLGAVGTSAVSLGLTANYARTGGQVTAGNVQSIIGVTFVYQPGDGNADVTITVNGKVVAKSGGMQIYEGKLTAEGLRFGIVASRFNHALVDRLVEGAIDAIVRHGGREEDITLVRVPGSWEIPVAAGELARKEDIDAVIAIGVLIRGATPHFDYIASEVSKGLADLSLELRKPITFGVITADTLEQAIERAGTKHGNKGWEAALSAIEMANLFKSLR

SEQ ID NO: 516 - protein, 473 aa, synthetic construct
  REGION 1..473: note Artificial____HsIgE(1-18)_Ec(J96)-FimH(22-300_F165V)_Linker -PGDGN_Ec(J96)-FimG(24-37)_Linker-SGG_LumSynth(1-154_C37A_N 102D) protein
MDWTWILFLVAAATRVHSFACKTANGTAIPIGGGSANVYVNLAPVVNVGQNLVVDLSTQIFCHNDYPETITDYVTLQRGSAYGGVLSNFSGTVKYSGSSYPFPTTSETPRVVYNSRTDKPWPVALYLTPVSSAGGVAIKAGSLIAVLILRQTNNYNSDDFQVVWNIYANNDVVVPTGGCDVSARDVTVTLPDYPGSVPIPLTVYCAKSQNLGYYLSGTTADAGNSIFTNTASFSPAQGVGVQLTRNGTIIPANNTVSLGAVGTSAVSLGLTANYARTGGQVTAGNVQSIIGVTFVYQPGDGNADVTITVNGKVVAKSGGMQIYEGKLTAEGLRFGIVASRFNHALVDRLVEGAIDAIVRHGGREEDITLVRVPGSWEIPVAAGELARKEDIDAVIAIGVLIRGATPHFDYIASEVSKGLADLSLELRKPITFGVITADTLEQAIERAGTKHGNKGWEAALSAIEMANLFKSLR

SEQ ID NO: 517 - protein, 482 aa, synthetic construct
  REGION 1..482: note Artificial____HsIgE(1-18)_Ec(J96)-FimH(22-300_N28S_N91S_N24 9Q)_Linker-PGDGN_Ec(J96)-FimG(24-37)_Linker-SGG_Ferritin(5- 167_N19Q) protein
MDWTWILFLVAAATRVHSFACKTASGTAIPIGGGSANVYVNLAPVVNVGQNLVVDLSTQIFCHNDYPETITDYVTLQRGSAYGGVLSSFSGTVKYSGSSYPFPTTSETPRVVYNSRTDKPWPVALYLTPVSSAGGVAIKAGSLIAVLILRQTNNYNSDDFQFVWNIYANNDVVVPTGGCDVSARDVTVTLPDYPGSVPIPLTVYCAKSQNLGYYLSGTTADAGNSIFTNTASFSPAQGVGVQLTRQGTIIPANNTVSLGAVGTSAVSLGLTANYARTGGQVTAGNVQSIIGVTFVYQPGDGNADVTITVNGKVVAKSGGDIIKLLNEQVNKEMQSSNLYMSMSSWCYTHSLDGAGLFLFDHAAEEYEHAKKLIIFLNENNVPVQLTSISAPEHKFEGLTQIFQKAYEHEQHISESINNIVDHAIKSKDHATFNFLQWYVAEQHEEEVLFKDILDKIELIGNENHGLYLADQYVKGIAKSRKS

SEQ ID NO: 518 - protein, 482 aa, synthetic construct
  REGION 1..482: note Artificial____HsIgE(1-18)_Ec(J96)-FimH(22-300_N28S_N91S_N24 9Q_N256D)_Linker-PGDGN_Ec(J96)-FimG(24-37)_Linker-SGG_Ferri tin(5-167_N19Q) protein
MDWTWILFLVAAATRVHSFACKTASGTAIPIGGGSANVYVNLAPVVNVGQNLVVDLSTQIFCHNDYPETITDYVTLQRGSAYGGVLSSFSGTVKYSGSSYPFPTTSETPRVVYNSRTDKPWPVALYLTPVSSAGGVAIKAGSLIAVLILRQTNNYNSDDFQFVWNIYANNDVVVPTGGCDVSARDVTVTLPDYPGSVPIPLTVYCAKSQNLGYYLSGTTADAGNSIFTNTASFSPAQGVGVQLTRQGTIIPADNTVSLGAVGTSAVSLGLTANYARTGGQVTAGNVQSIIGVTFVYQPGDGNADVTITVNGKVVAKSGGDIIKLLNEQVNKEMQSSNLYMSMSSWCYTHSLDGAGLFLFDHAAEEYEHAKKLIIFLNENNVPVQLTSISAPEHKFEGLTQIFQKAYEHEQHISESINNIVDHAIKSKDHATFNFLQWYVAEQHEEEVLFKDILDKIELIGNENHGLYLADQYVKGIAKSRKS

SEQ ID NO: 519 - protein, 482 aa, synthetic construct
  REGION 1..482: note Artificial____HsIgE(1-18)_Ec(J96)-FimH(22-300_N28S_V48C_L55 C_N91S_N249Q)_Linker-PGDGN_Ec(J96)-FimG(24-37)_Linker-SGG_F erritin(5-167_N19Q) protein
MDWTWILFLVAAATRVHSFACKTASGTAIPIGGGSANVYVNLAPCVNVGQNCVVDLSTQIFCHNDYPETITDYVTLQRGSAYGGVLSSFSGTVKYSGSSYPFPTTSETPRVVYNSRTDKPWPVALYLTPVSSAGGVAIKAGSLIAVLILRQTNNYNSDDFQFVWNIYANNDVVVPTGGCDVSARDVTVTLPDYPGSVPIPLTVYCAKSQNLGYYLSGTTADAGNSIFTNTASFSPAQGVGVQLTRQGTIIPANNTVSLGAVGTSAVSLGLTANYARTGGQVTAGNVQSIIGVTFVYQPGDGNADVTITVNGKVVAKSGGDIIKLLNEQVNKEMQSSNLYMSMSSWCYTHSLDGAGLFLFDHAAEEYEHAKKLIIFLNENNVPVQLTSISAPEHKFEGLTQIFQKAYEHEQHISESINNIVDHAIKSKDHATFNFLQWYVAEQHEEEVLFKDILDKIELIGNENHGLYLADQYVKGIAKSRKS

SEQ ID NO: 520 - protein, 482 aa, synthetic construct
  REGION 1..482: note Artificial____HsIgE(1-18)_Ec(J96)-FimH(22-300_F165V)_Linker -PGDGN_Ec(J96)-FimG(24-37)_Linker-SGG_Ferritin(5-167_N19Q) protein
MDWTWILFLVAAATRVHSFACKTANGTAIPIGGGSANVYVNLAPVVNVGQNLVVDLSTQIFCHNDYPETITDYVTLQRGSAYGGVLSNFSGTVKYSGSSYPFPTTSETPRVVYNSRTDKPWPVALYLTPVSSAGGVAIKAGSLIAVLILRQTNNYNSDDFQVVWNIYANNDVVVPTGGCDVSARDVTVTLPDYPGSVPIPLTVYCAKSQNLGYYLSGTTADAGNSIFTNTASFSPAQGVGVQLTRNGTIIPANNTVSLGAVGTSAVSLGLTANYARTGGQVTAGNVQSIIGVTFVYQPGDGNADVTITVNGKVVAKSGGDIIKLLNEQVNKEMQSSNLYMSMSSWCYTHSLDGAGLFLFDHAAEEYEHAKKLIIFLNENNVPVQLTSISAPEHKFEGLTQIFQKAYEHEQHISESINNIVDHAIKSKDHATFNFLQWYVAEQHEEEVLFKDILDKIELIGNENHGLYLADQYVKGIAKSRKS

SEQ ID NO: 521 - RNA, 726 nt, synthetic construct; identical to SEQ ID NO: 319
  misc_feature 1..726: note Artificial____Ec(J96)-FimC(1-36)_Ec(J96)-FimC(37-241) CDS opt1
  source 1..726: mol_type = other RNA

SEQ ID NO: 522 - RNA, 672 nt, synthetic construct
  misc_feature 1..672: note = Artificial____HsIgE(1-18)_Ec(J96)-FimC(37-241) CDS opt1
  source 1..672: mol_type = other RNA
atggactggacctggatcctgttcctcgtggccgccgcgacccgcgtccacagcggcgtggccctgggggccacccgcgtcatctaccccgcgggccagaagcaggtccagctcgccgtgaccaacaacgacgagaacagcacgtacctgatccagtcctgggtggagaacgccgacggggtgaaggacggccggttcatcgtgaccccgcccctgttcgccatgaaggggaagaaggagaacaccctccgcatcctggacgccaccaacaaccagctgccccaggaccgggagagcctcttctggatgaacgtcaaggcgatcccctccatggacaagagcaagctgacggagaacaccctgcagctcgccatcatctcccgcatcaagctgtactaccggccggccaagctggccctcccgcccgaccaggcggccgagaagctgcgcttccggcgcagcgccaactccctgaccctcatcaaccccaccccctactacctgacggtgaccgagctgaacgccggcacccgggtgctcgagaacgccctggtcccgcccatgggcgagagcaccgtgaagctgccctccgacgcggggagcaacatcacgtaccgcaccatcaacgactacggcgccctcacccccaagatgaccggggtgatggagtga

SEQ ID NO: 523 - RNA, 903 nt, synthetic construct; identical to SEQ ID NO: 197
  misc_feature 1..903: note Artificial____Ec(J96)-FimH(1-21)_Ec(J96)-FimH(22-300) CDS opt1
  source 1..903: mol_type = other RNA

SEQ ID NO: 524 - RNA, 894 nt, synthetic construct
  misc_feature 1..894: note = Artificial____HsIgE(1-18)_Ec(J96)-FimH(22-300) CDS opt1
  source 1..894: mol_type = other RNA
atggactggacctggatcctgttcctcgtggccgccgcgacccgcgtccacagcttcgcctgcaagaccgccaacggcaccgcgatccccatcgggggcgggagcgccaacgtgtacgtcaacctggccccggtggtgaacgtcggccagaacctcgtggtggacctgtccacgcagatcttctgccacaacgactaccccgagaccatcaccgactacgtcaccctgcagcgcgggagcgcctacggcggcgtgctctccaacttcagcgggacggtgaagtactccggcagctcctaccccttccccaccaccagcgagaccccgcgggtcgtgtacaactcccgcacggacaagccctggcccgtggccctgtacctgacccccgtcagctccgccgggggcgtggcgatcaaggccgggagcctcatcgccgtgctgatcctgcggcagaccaacaactacaactccgacgacttccagttcgtctggaacatctacgcgaacaacgacgtggtggtcccgaccggcggctgcgacgtgagcgcccgcgacgtgacggtcaccctccccgactaccccgggtccgtgcccatcccgctgaccgtgtactgcgccaagagccagaacctgggctactacctctccgggaccacggccgacgccggcaacagcatcttcaccaacaccgcgtccttcagccccgcccagggcgtcggggtgcagctgacccggaacggcacgatcatccccgccaacaacaccgtcagcctgggggccgtgggcacctccgccgtgagcctcgggctgaccgcgaactacgcccgcacgggcggccaggtcaccgccgggaacgtgcagtccatcatcggcgtgaccttcgtctaccagtga

SEQ ID NO: 525 - RNA, 900 nt, synthetic construct
  misc_feature 1..900: note = Artificial____MmIgK(1-20)_Ec(J96)-FimH(22-300) CDS opt1
  source 1..900: mol_type = other RNA
atggagaccgacaccctgctcctgtgggtgctgctcctgtgggtccccggcagcacggggttcgcctgcaagaccgccaacggcaccgcgatccccatcgggggcgggagcgccaacgtgtacgtcaacctggccccggtggtgaacgtcggccagaacctcgtggtggacctgtccacgcagatcttctgccacaacgactaccccgagaccatcaccgactacgtcaccctgcagcgcgggagcgcctacggcggcgtgctctccaacttcagcgggacggtgaagtactccggcagctcctaccccttccccaccaccagcgagaccccgcgggtcgtgtacaactcccgcacggacaagccctggcccgtggccctgtacctgacccccgtcagctccgccgggggcgtggcgatcaaggccgggagcctcatcgccgtgctgatcctgcggcagaccaacaactacaactccgacgacttccagttcgtctggaacatctacgcgaacaacgacgtggtggtcccgaccggcggctgcgacgtgagcgcccgcgacgtgacggtcaccctccccgactaccccgggtccgtgcccatcccgctgaccgtgtactgcgccaagagccagaacctgggctactacctctccgggaccacggccgacgccggcaacagcatcttcaccaacaccgcgtccttcagccccgcccagggcgtcggggtgcagctgacccggaacggcacgatcatccccgccaacaacaccgtcagcctgggggccgtgggcacctccgccgtgagcctcgggctgaccgcgaactacgcccgcacgggcggccaggtcaccgccgggaacgtgcagtccatcatcggcgtgaccttcgtctaccagtga

SEQ ID NO: 526 - RNA, 960 nt, synthetic construct
  misc_feature 1..960: note Artificial____Ec(J96)-FimH(1-21)_Ec(J96)-FimH(22-300)_Linke r-PGDGN_Ec(J96)-FimG(24-37) CDS opt1
  source 1..960: mol_type = other RNA
atgaagcgcgtgatcaccctgttcgccgtcctcctgatgggctggagcgtgaacgcctggtccttcgcctgcaagaccgccaacggcaccgcgatccccatcgggggcgggagcgccaacgtgtacgtcaacctggccccggtggtgaacgtcggccagaacctcgtggtggacctgtccacgcagatcttctgccacaacgactaccccgagaccatcaccgactacgtcaccctgcagcgcgggagcgcctacggcggcgtgctctccaacttcagcgggacggtgaagtactccggcagctcctaccccttccccaccaccagcgagaccccgcgggtcgtgtacaactcccgcacggacaagccctggcccgtggccctgtacctgacccccgtcagctccgccgggggcgtggcgatcaaggccgggagcctcatcgccgtgctgatcctgcggcagaccaacaactacaactccgacgacttccagttcgtctggaacatctacgcgaacaacgacgtggtggtcccgaccggcggctgcgacgtgagcgcccgcgacgtgacggtcaccctccccgactaccccgggtccgtgcccatcccgctgaccgtgtactgcgccaagagccagaacctgggctactacctctccgggaccacggccgacgccggcaacagcatcttcaccaacaccgcgtccttcagccccgcccagggcgtcggggtgcagctgacccggaacggcacgatcatccccgccaacaacaccgtcagcctgggggccgtgggcacctccgccgtgagcctcgggctgaccgcgaactacgcccgcacgggcggccaggtcaccgccgggaacgtgcagtccatcatcggcgtgaccttcgtctaccagcccggcgacgggaacgccgacgtgaccatcaccgtcaacggcaaggtggtggccaagtga

SEQ ID NO: 527 - RNA, 951 nt, synthetic construct
  misc_feature 1..951: note Artificial____HsIgE(1-18)_Ec(J96)-FimH(22-300)_Linker-PGDGN _Ec(J96)-FimG(24-37) CDS opt1
  source 1..951: mol_type = other RNA
atggactggacctggatcctgttcctcgtggccgccgcgacccgcgtccacagcttcgcctgcaagaccgccaacggcaccgcgatccccatcgggggcgggagcgccaacgtgtacgtcaacctggccccggtggtgaacgtcggccagaacctcgtggtggacctgtccacgcagatcttctgccacaacgactaccccgagaccatcaccgactacgtcaccctgcagcgcgggagcgcctacggcggcgtgctctccaacttcagcgggacggtgaagtactccggcagctcctaccccttccccaccaccagcgagaccccgcgggtcgtgtacaactcccgcacggacaagccctggcccgtggccctgtacctgacccccgtcagctccgccgggggcgtggcgatcaaggccgggagcctcatcgccgtgctgatcctgcggcagaccaacaactacaactccgacgacttccagttcgtctggaacatctacgcgaacaacgacgtggtggtcccgaccggcggctgcgacgtgagcgcccgcgacgtgacggtcaccctccccgactaccccgggtccgtgcccatcccgctgaccgtgtactgcgccaagagccagaacctgggctactacctctccgggaccacggccgacgccggcaacagcatcttcaccaacaccgcgtccttcagccccgcccagggcgtcggggtgcagctgacccggaacggcacgatcatccccgccaacaacaccgtcagcctgggggccgtgggcacctccgccgtgagcctcgggctgaccgcgaactacgcccgcacgggcggccaggtcaccgccgggaacgtgcagtccatcatcggcgtgaccttcgtctaccagcccggcgacgggaacgccgacgtgaccatcaccgtcaacggcaaggtggtggccaagtga

SEQ ID NO: 528 - RNA, 957 nt, synthetic construct
  misc_feature 1..957: note Artificial____HsIgE(1-18)_Ec(J96)-FimH(22-300)_Linker-G4SGG _Ec(J96)-FimG(24-37) CDS opt1
  source 1..957: mol_type = other RNA
atggactggacctggatcctgttcctcgtggccgccgcgacccgcgtccacagcttcgcctgcaagaccgccaacggcaccgcgatccccatcgggggcgggagcgccaacgtgtacgtcaacctggccccggtggtgaacgtcggccagaacctcgtggtggacctgtccacgcagatcttctgccacaacgactaccccgagaccatcaccgactacgtcaccctgcagcgcgggagcgcctacggcggcgtgctctccaacttcagcgggacggtgaagtactccggcagctcctaccccttccccaccaccagcgagaccccgcgggtcgtgtacaactcccgcacggacaagccctggcccgtggccctgtacctgacccccgtcagctccgccgggggcgtggcgatcaaggccgggagcctcatcgccgtgctgatcctgcggcagaccaacaactacaactccgacgacttccagttcgtctggaacatctacgcgaacaacgacgtggtggtcccgaccggcggctgcgacgtgagcgcccgcgacgtgacggtcaccctccccgactaccccgggtccgtgcccatcccgctgaccgtgtactgcgccaagagccagaacctgggctactacctctccgggaccacggccgacgccggcaacagcatcttcaccaacaccgcgtccttcagccccgcccagggcgtcggggtgcagctgacccggaacggcacgatcatccccgccaacaacaccgtcagcctgggggccgtgggcacctccgccgtgagcctcgggctgaccgcgaactacgcccgcacgggcggccaggtcaccgccgggaacgtgcagtccatcatcggcgtgaccttcgtctaccagggcggcggcggctccggaggcgccgacgtgaccatcaccgtcaacggcaaggtggtggccaagtga

SEQ ID NO: 529 - RNA, 957 nt, synthetic construct
  misc_feature 1..957: note Artificial____MmIgK(1-20)_Ec(J96)-FimH(22-300)_Linker-PGDGN _Ec(J96)-FimG(24-37) CDS opt1
  source 1..957: mol_type = other RNA
atggagaccgacaccctgctcctgtgggtgctgctcctgtgggtccccggcagcacggggttcgcctgcaagaccgccaacggcaccgcgatccccatcgggggcgggagcgccaacgtgtacgtcaacctggccccggtggtgaacgtcggccagaacctcgtggtggacctgtccacgcagatcttctgccacaacgactaccccgagaccatcaccgactacgtcaccctgcagcgcgggagcgcctacggcggcgtgctctccaacttcagcgggacggtgaagtactccggcagctcctaccccttccccaccaccagcgagaccccgcgggtcgtgtacaactcccgcacggacaagccctggcccgtggccctgtacctgacccccgtcagctccgccgggggcgtggcgatcaaggccgggagcctcatcgccgtgctgatcctgcggcagaccaacaactacaactccgacgacttccagttcgtctggaacatctacgcgaacaacgacgtggtggtcccgaccggcggctgcgacgtgagcgcccgcgacgtgacggtcaccctccccgactaccccgggtccgtgcccatcccgctgaccgtgtactgcgccaagagccagaacctgggctactacctctccgggaccacggccgacgccggcaacagcatcttcaccaacaccgcgtccttcagccccgcccagggcgtcggggtgcagctgacccggaacggcacgatcatccccgccaacaacaccgtcagcctgggggccgtgggcacctccgccgtgagcctcgggctgaccgcgaactacgcccgcacgggcggccaggtcaccgccgggaacgtgcagtccatcatcggcgtgaccttcgtctaccagcccggcgacgggaacgccgacgtgaccatcaccgtcaacggcaaggtggtggccaagtga

SEQ ID NO: 530 - RNA, 957 nt, synthetic construct
  misc_feature 1..957: note Artificial____MmIgK(1-20)_Ec(536)-FimH(22-300)_Linker-PGDGN _Ec(J96)-FimG(24-37) CDS opt1
  source 1..957: mol_type = other RNA
atggagaccgacaccctgctcctgtgggtgctgctcctgtgggtccccggcagcacggggttcgcctgcaagaccgccaacggcaccgcgatccccatcgggggcgggagcgccaacgtgtacgtcaacctggccccggccgtgaacgtcggccagaacctcgtggtggacctgtccacgcagatcttctgccacaacgactaccccgagaccatcaccgactacgtcaccctgcagcgcgggagcgcctacggcggcgtgctctccagcttcagcgggacggtgaagtacaacggcagctcctaccccttccccaccaccagcgagaccccgcgggtcgtgtacaactcccgcacggacaagccctggcccgtggccctgtacctgacccccgtcagctccgccgggggcgtggcgatcaaggccgggagcctcatcgccgtgctgatcctgcggcagaccaacaactacaactccgacgacttccagttcgtctggaacatctacgcgaacaacgacgtggtggtcccgaccggcggctgcgacgtgagcgcccgcgacgtgacggtcaccctccccgactaccccgggtccgtgcccatcccgctgaccgtgtactgcgccaagagccagaacctgggctactacctctccgggaccacggccgacgccggcaacagcatcttcaccaacaccgcgtccttcagccccgcccagggcgtcggggtgcagctgacccggaacggcacgatcatccccgccaacaacaccgtcagcctgggggccgtgggcacctccgccgtgagcctcgggctgaccgcgaactacgcccgcacgggcggccaggtcaccgccgggaacgtgcagtccatcatcggcgtgaccttcgtctaccagcccggcgacgggaacgccgacgtgaccatcaccgtcaacggcaaggtggtggccaagtga

SEQ ID NO: 531 - RNA, 981 nt, synthetic construct
  misc_feature 1..981: note Artificial____HsIgE(1-18)_Ec(J96)-FimH(22-300)_Linker-(G4S) 3_Ec(J96)-FimC(135-148) CDS opt1
  source 1..981: mol_type = other RNA
atggactggacctggatcctgttcctcgtggccgccgcgacccgcgtccacagcttcgcctgcaagaccgccaacggcaccgcgatccccatcgggggcgggagcgccaacgtgtacgtcaacctggccccggtggtgaacgtcggccagaacctcgtggtggacctgtccacgcagatcttctgccacaacgactaccccgagaccatcaccgactacgtcaccctgcagcgcgggagcgcctacggcggcgtgctctccaacttcagcgggacggtgaagtactccggcagctcctaccccttccccaccaccagcgagaccccgcgggtcgtgtacaactcccgcacggacaagccctggcccgtggccctgtacctgacccccgtcagctccgccgggggcgtggcgatcaaggccgggagcctcatcgccgtgctgatcctgcggcagaccaacaactacaactccgacgacttccagttcgtctggaacatctacgcgaacaacgacgtggtggtcccgaccggcggctgcgacgtgagcgcccgcgacgtgacggtcaccctccccgactaccccgggtccgtgcccatcccgctgaccgtgtactgcgccaagagccagaacctgggctactacctctccgggaccacggccgacgccggcaacagcatcttcaccaacaccgcgtccttcagccccgcccagggcgtcggggtgcagctgacccggaacggcacgatcatccccgccaacaacaccgtcagcctgggggccgtgggcacctccgccgtgagcctcgggctgaccgcgaactacgcccgcacgggcggccaggtcaccgccgggaacgtgcagtccatcatcggcgtgaccttcgtctaccagggcgggggcgggagcggcgggggcggctccgggggcgggggcagcacggagaacaccctgcagctcgccatcatctcccgcatcaagtga

SEQ ID NO: 532 - RNA, 1404 nt, synthetic construct
  misc_feature 1..1404: note Artificial____LumSynth(1-154_C37A_N102D)_Linker(GGS)4-GGG_E c(J96)-FimH(22-300)_Linker-PGDGN_Ec(J96)-FimG(24-37) CDS opt1
  source 1..1404: mol_type = other RNA
atgcagatctacgagggcaagctgaccgccgaggggctccgcttcggcatcgtggccagccggttcaaccacgcgctggtcgaccgcctggtggagggggccatcgacgccatcgtgcggcacggcgggcgcgaggaggacatcaccctcgtccgggtgcccggctcctgggagatcccggtggccgccggcgagctggcccgcaaggaggacatcgacgcggtcatcgccatcggggtgctgatccggggcgccacgccccacttcgactacatcgccagcgaggtgtccaaggggctcgcggacctgagcctggagctccgcaagcccatcaccttcggcgtcatcaccgccgacaccctggagcaggccatcgagcgggccgggacgaagcacggcaacaagggctgggaggccgcgctgtccgccatcgagatggccaacctcttcaagagcctgcgcggcgggagcggcgggtccggcgggagcggcggctccgggggcgggttcgcctgcaagaccgccaacggcaccgcgatccccatcgggggcgggagcgccaacgtgtacgtcaacctggccccggtggtgaacgtcggccagaacctcgtggtggacctgtccacgcagatcttctgccacaacgactaccccgagaccatcaccgactacgtcaccctgcagcgcgggagcgcctacggcggcgtgctctccaacttcagcgggacggtgaagtactccggcagctcctaccccttccccaccaccagcgagaccccgcgggtcgtgtacaactcccgcacggacaagccctggcccgtggccctgtacctgacccccgtcagctccgccgggggcgtggcgatcaaggccgggagcctcatcgccgtgctgatcctgcggcagaccaacaactacaactccgacgacttccagttcgtctggaacatctacgcgaacaacgacgtggtggtcccgaccggcggctgcgacgtgagcgcccgcgacgtgacggtcaccctccccgactaccccgggtccgtgcccatcccgctgaccgtgtactgcgccaagagccagaacctgggctactacctctccgggaccacggccgacgccggcaacagcatcttcaccaacaccgcgtccttcagccccgcccagggcgtcggggtgcagctgacccggaacggcacgatcatccccgccaacaacaccgtcagcctgggggccgtgggcacctccgccgtgagcctcgggctgaccgcgaactacgcccgcacgggcggccaggtcaccgccgggaacgtgcagtccatcatcggcgtgaccttcgtctaccagcccggcgacgggaacgccgacgtgaccatcaccgtcaacggcaaggtggtggccaagtga

SEQ ID NO: 533 - RNA, 1422 nt, synthetic construct
  misc_feature 1..1422: note Artificial____HsIgE(1-18)_Ec(J96)-FimH(22-300)_Linker-PGDGN _Ec(J96)-FimG(24-37)_Linker-SGG_LumSynth(1-154_C37A_N102D) CDS opt1
  source 1..1422: mol_type = other RNA
atggactggacctggatcctgttcctcgtggccgccgcgacccgcgtccacagcttcgcctgcaagaccgccaacggcaccgcgatccccatcgggggcgggagcgccaacgtgtacgtcaacctggccccggtggtgaacgtcggccagaacctcgtggtggacctgtccacgcagatcttctgccacaacgactaccccgagaccatcaccgactacgtcaccctgcagcgcgggagcgcctacggcggcgtgctctccaacttcagcgggacggtgaagtactccggcagctcctaccccttccccaccaccagcgagaccccgcgggtcgtgtacaactcccgcacggacaagccctggcccgtggccctgtacctgacccccgtcagctccgccgggggcgtggcgatcaaggccgggagcctcatcgccgtgctgatcctgcggcagaccaacaactacaactccgacgacttccagttcgtctggaacatctacgcgaacaacgacgtggtggtcccgaccggcggctgcgacgtgagcgcccgcgacgtgacggtcaccctccccgactaccccgggtccgtgcccatcccgctgaccgtgtactgcgccaagagccagaacctgggctactacctctccgggaccacggccgacgccggcaacagcatcttcaccaacaccgcgtccttcagccccgcccagggcgtcggggtgcagctgacccggaacggcacgatcatccccgccaacaacaccgtcagcctgggggccgtgggcacctccgccgtgagcctcgggctgaccgcgaactacgcccgcacgggcggccaggtcaccgccgggaacgtgcagtccatcatcggcgtgaccttcgtctaccagcccggcgacgggaacgccgacgtgaccatcaccgtcaacggcaaggtggtggccaagagcggcgggatgcagatctacgagggcaagctgaccgccgaggggctccgcttcggcatcgtggccagccggttcaaccacgcgctggtcgaccgcctggtggagggggccatcgacgccatcgtgcggcacggcgggcgcgaggaggacatcaccctcgtccgggtgcccggctcctgggagatcccggtggccgccggcgagctggcccgcaaggaggacatcgacgcggtcatcgccatcggggtgctgatccggggcgccacgccccacttcgactacatcgccagcgaggtgtccaaggggctcgcggacctgagcctggagctccgcaagcccatcaccttcggcgtcatcaccgccgacaccctggagcaggccatcgagcgggccgggacgaagcacggcaacaagggctgggaggccgcgctgtccgccatcgagatggccaacctcttcaagagcctgcgctga

SEQ ID NO: 534 - RNA, 1449 nt, synthetic construct
  misc_feature 1..1449: note Artificial____HsIgE(1-18)_Ec(J96)-FimH(22-300)_Linker-PGDGN _Ec(J96)-FimG(24-37)_Linker-SGG_Ferritin(5-167_N19Q) CDS opt1
  source 1..1449: mol_type = other RNA
atggactggacctggatcctgttcctcgtggccgccgcgacccgcgtccacagcttcgcctgcaagaccgccaacggcaccgcgatccccatcgggggcgggagcgccaacgtgtacgtcaacctggccccggtggtgaacgtcggccagaacctcgtggtggacctgtccacgcagatcttctgccacaacgactaccccgagaccatcaccgactacgtcaccctgcagcgcgggagcgcctacggcggcgtgctctccaacttcagcgggacggtgaagtactccggcagctcctaccccttccccaccaccagcgagaccccgcgggtcgtgtacaactcccgcacggacaagccctggcccgtggccctgtacctgacccccgtcagctccgccgggggcgtggcgatcaaggccgggagcctcatcgccgtgctgatcctgcggcagaccaacaactacaactccgacgacttccagttcgtctggaacatctacgcgaacaacgacgtggtggtcccgaccggcggctgcgacgtgagcgcccgcgacgtgacggtcaccctccccgactaccccgggtccgtgcccatcccgctgaccgtgtactgcgccaagagccagaacctgggctactacctctccgggaccacggccgacgccggcaacagcatcttcaccaacaccgcgtccttcagccccgcccagggcgtcggggtgcagctgacccggaacggcacgatcatccccgccaacaacaccgtcagcctgggggccgtgggcacctccgccgtgagcctcgggctgaccgcgaactacgcccgcacgggcggccaggtcaccgccgggaacgtgcagtccatcatcggcgtgaccttcgtctaccagcccggcgacgggaacgccgacgtgaccatcaccgtcaacggcaaggtggtggccaagagcggcggggacatcatcaagctcctgaacgagcaggtcaacaaggagatgcagtccagcaacctgtacatgtccatgagctcctggtgctacacccacagcctcgacggcgccgggctgttcctgttcgaccacgccgcggaggagtacgagcacgccaagaagctcatcatcttcctgaacgagaacaacgtgcccgtgcagctgacctccatcagcgccccggagcacaagttcgagggcctcacgcagatcttccagaaggcctacgagcacgagcagcacatctccgagagcatcaacaacatcgtggaccacgccatcaagtccaaggaccacgcgaccttcaacttcctgcagtggtacgtcgccgagcagcacgaggaggaggtgctgttcaaggacatcctcgacaagatcgagctgatcgggaacgagaaccacggcctgtacctcgccgaccagtacgtgaaggggatcgccaagagccgcaagtcctga

SEQ ID NO: 535 - RNA, 1479 nt, synthetic construct
  misc_feature 1..1479: note Artificial____MmIgK(1-20)_Ec(J96)-FimH(22-300)_Linker-PGDGN _Ec(J96)-FimG(24-37)_Linker-(GGS)4_Ferritin(5-166) CDS opt1
  source 1..1479: mol_type = other RNA
atggagaccgacaccctgctcctgtgggtgctgctcctgtgggtccccggcagcacggggttcgcctgcaagaccgccaacggcaccgcgatccccatcgggggcgggagcgccaacgtgtacgtcaacctggccccggtggtgaacgtcggccagaacctcgtggtggacctgtccacgcagatcttctgccacaacgactaccccgagaccatcaccgactacgtcaccctgcagcgcgggagcgcctacggcggcgtgctctccaacttcagcgggacggtgaagtactccggcagctcctaccccttccccaccaccagcgagaccccgcgggtcgtgtacaactcccgcacggacaagccctggcccgtggccctgtacctgacccccgtcagctccgccgggggcgtggcgatcaaggccgggagcctcatcgccgtgctgatcctgcggcagaccaacaactacaactccgacgacttccagttcgtctggaacatctacgcgaacaacgacgtggtggtcccgaccggcggctgcgacgtgagcgcccgcgacgtgacggtcaccctccccgactaccccgggtccgtgcccatcccgctgaccgtgtactgcgccaagagccagaacctgggctactacctctccgggaccacggccgacgccggcaacagcatcttcaccaacaccgcgtccttcagccccgcccagggcgtcggggtgcagctgacccggaacggcacgatcatccccgccaacaacaccgtcagcctgggggccgtgggcacctccgccgtgagcctcgggctgaccgcgaactacgcccgcacgggcggccaggtcaccgccgggaacgtgcagtccatcatcggcgtgaccttcgtctaccagcccggcgacgggaacgccgacgtgaccatcaccgtcaacggcaaggtggtggccaagggcgggagcggcgggtccggcgggagcggcggctccgacatcatcaagctcctgaacgagcaggtcaacaaggagatgaactccagcaacctgtacatgtccatgagctcctggtgctacacccacagcctcgacggcgccgggctgttcctgttcgaccacgccgcggaggagtacgagcacgccaagaagctcatcatcttcctgaacgagaacaacgtgcccgtgcagctgacctccatcagcgccccggagcacaagttcgagggcctcacgcagatcttccagaaggcctacgagcacgagcagcacatctccgagagcatcaacaacatcgtggaccacgccatcaagtccaaggaccacgcgaccttcaacttcctgcagtggtacgtcgccgagcagcacgaggaggaggtgctgttcaaggacatcctcgacaagatcgagctgatcgggaacgagaaccacggcctgtacctcgccgaccagtacgtgaaggggatcgccaagagccgcaagtga

SEQ ID NO: 536 - RNA, 1122 nt, synthetic construct
  misc_feature 1..1122: note Artificial____HsIgE(1-18)_Ec(J96)-FimH(22-300)_Linker-PGDGN _Ec(J96)-FimG(24-37)_TMdomain-HA(510-566) CDS opt1
  source 1..1122: mol_type = other RNA
atggactggacctggatcctgttcctcgtggccgccgcgacccgcgtccacagcttcgcctgcaagaccgccaacggcaccgcgatccccatcgggggcgggagcgccaacgtgtacgtcaacctggccccggtggtgaacgtcggccagaacctcgtggtggacctgtccacgcagatcttctgccacaacgactaccccgagaccatcaccgactacgtcaccctgcagcgcgggagcgcctacggcggcgtgctctccaacttcagcgggacggtgaagtactccggcagctcctaccccttccccaccaccagcgagaccccgcgggtcgtgtacaactcccgcacggacaagccctggcccgtggccctgtacctgacccccgtcagctccgccgggggcgtggcgatcaaggccgggagcctcatcgccgtgctgatcctgcggcagaccaacaactacaactccgacgacttccagttcgtctggaacatctacgcgaacaacgacgtggtggtcccgaccggcggctgcgacgtgagcgcccgcgacgtgacggtcaccctccccgactaccccgggtccgtgcccatcccgctgaccgtgtactgcgccaagagccagaacctgggctactacctctccgggaccacggccgacgccggcaacagcatcttcaccaacaccgcgtccttcagccccgcccagggcgtcggggtgcagctgacccggaacggcacgatcatccccgccaacaacaccgtcagcctgggggccgtgggcacctccgccgtgagcctcgggctgaccgcgaactacgcccgcacgggcggccaggtcaccgccgggaacgtgcagtccatcatcggcgtgaccttcgtctaccagcccggcgacgggaacgccgacgtgaccatcaccgtcaacggcaaggtggtggccaaggccaagctgaaccgcgaggagatcgacggcgtgaagctcgagtccacgcggatctaccagatcctggcgatctacagcaccgtcgccagctccctggtgctcgtggtcagcctgggggccatctccttctggatgtgcagcaacggctccctgcagtgccgcatctgcatctga

SEQ ID NO: 537 - RNA, 1455 nt, synthetic construct
  misc_feature 1..1455: note Artificial____HsIgE(1-18)_LumSynth(1-154_C37A_N102D)_Linker (GGS)4-GGG_Ec(J96)-FimH(22-300)_Linker-PGDGN_Ec(J96)-FimG(2 4-37) CDS opt1
  source 1..1455: mol_type = other RNA
atggactggacctggatcctgttcctcgtggccgccgcgacccgcgtccacagccagatctacgagggcaagctgaccgccgaggggctccgcttcggcatcgtggccagccggttcaaccacgcgctggtcgaccgcctggtggagggggccatcgacgccatcgtgcggcacggcgggcgcgaggaggacatcaccctcgtccgggtgcccggctcctgggagatcccggtggccgccggcgagctggcccgcaaggaggacatcgacgcggtcatcgccatcggggtgctgatccggggcgccacgccccacttcgactacatcgccagcgaggtgtccaaggggctcgcggacctgagcctggagctccgcaagcccatcaccttcggcgtcatcaccgccgacaccctggagcaggccatcgagcgggccgggacgaagcacggcaacaagggctgggaggccgcgctgtccgccatcgagatggccaacctcttcaagagcctgcgcggcgggagcggcgggtccggcgggagcggcggctccgggggcgggttcgcctgcaagaccgccaacggcaccgcgatccccatcgggggcgggagcgccaacgtgtacgtcaacctggccccggtggtgaacgtcggccagaacctcgtggtggacctgtccacgcagatcttctgccacaacgactaccccgagaccatcaccgactacgtcaccctgcagcgcgggagcgcctacggcggcgtgctctccaacttcagcgggacggtgaagtactccggcagctcctaccccttccccaccaccagcgagaccccgcgggtcgtgtacaactcccgcacggacaagccctggcccgtggccctgtacctgacccccgtcagctccgccgggggcgtggcgatcaaggccgggagcctcatcgccgtgctgatcctgcggcagaccaacaactacaactccgacgacttccagttcgtctggaacatctacgcgaacaacgacgtggtggtcccgaccggcggctgcgacgtgagcgcccgcgacgtgacggtcaccctccccgactaccccgggtccgtgcccatcccgctgaccgtgtactgcgccaagagccagaacctgggctactacctctccgggaccacggccgacgccggcaacagcatcttcaccaacaccgcgtccttcagccccgcccagggcgtcggggtgcagctgacccggaacggcacgatcatccccgccaacaacaccgtcagcctgggggccgtgggcacctccgccgtgagcctcgggctgaccgcgaactacgcccgcacgggcggccaggtcaccgccgggaacgtgcagtccatcatcggcgtgaccttcgtctaccagcccggcgacgggaacgccgacgtgaccatcaccgtcaacggcaaggtggtggccaagtga

SEQ ID NO: 538 - RNA, 1422 nt, synthetic construct
  misc_feature 1..1422: note Artificial____HsIgE(1-18)_Ec(J96)-FimH(22-300_N28S_N91S_N24 9Q)_Linker-PGDGN_Ec(J96)-FimG(24-37)_Linker-SGG_LumSynth(1- 154_C37A_N102D) CDS opt1
  source 1..1422: mol_type = other RNA
atggactggacctggatcctgttcctcgtggccgccgcgacccgcgtccacagcttcgcctgcaagaccgccagcggcaccgcgatccccatcgggggcgggagcgccaacgtgtacgtcaacctggccccggtggtgaacgtcggccagaacctcgtggtggacctgtccacgcagatcttctgccacaacgactaccccgagaccatcaccgactacgtcaccctgcagcgcgggagcgcctacggcggcgtgctctccagcttcagcgggacggtgaagtactccggcagctcctaccccttccccaccaccagcgagaccccgcgggtcgtgtacaactcccgcacggacaagccctggcccgtggccctgtacctgacccccgtcagctccgccgggggcgtggcgatcaaggccgggagcctcatcgccgtgctgatcctgcggcagaccaacaactacaactccgacgacttccagttcgtctggaacatctacgcgaacaacgacgtggtggtcccgaccggcggctgcgacgtgagcgcccgcgacgtgacggtcaccctccccgactaccccgggtccgtgcccatcccgctgaccgtgtactgcgccaagagccagaacctgggctactacctctccgggaccacggccgacgccggcaacagcatcttcaccaacaccgcgtccttcagccccgcccagggcgtcggggtgcagctgacccggcagggcacgatcatccccgccaacaacaccgtcagcctgggggccgtgggcacctccgccgtgagcctcgggctgaccgcgaactacgcccgcacgggcggccaggtcaccgccgggaacgtgcagtccatcatcggcgtgaccttcgtctaccagcccggcgacgggaacgccgacgtgaccatcaccgtcaacggcaaggtggtggccaagagcggcgggatgcagatctacgagggcaagctgaccgccgaggggctccgcttcggcatcgtggccagccggttcaaccacgcgctggtcgaccgcctggtggagggggccatcgacgccatcgtgcggcacggcgggcgcgaggaggacatcaccctcgtccgggtgcccggctcctgggagatcccggtggccgccggcgagctggcccgcaaggaggacatcgacgcggtcatcgccatcggggtgctgatccggggcgccacgccccacttcgactacatcgccagcgaggtgtccaaggggctcgcggacctgagcctggagctccgcaagcccatcaccttcggcgtcatcaccgccgacaccctggagcaggccatcgagcgggccgggacgaagcacggcaacaagggctgggaggccgcgctgtccgccatcgagatggccaacctcttcaagagcctgcgctga

SEQ ID NO: 539 - RNA, 1422 nt, synthetic construct
  misc_feature 1..1422: note Artificial____HsIgE(1-18)_Ec(J96)-FimH(22-300_N28S_N91S_N24 9Q_N256D)_Linker-PGDGN_Ec(J96)-FimG(24-37)_Linker-SGG_LumSy nth(1-154_C37A_N102D) CDS opt1
  source 1..1422: mol_type = other RNA
atggactggacctggatcctgttcctcgtggccgccgcgacccgcgtccacagcttcgcctgcaagaccgccagcggcaccgcgatccccatcgggggcgggagcgccaacgtgtacgtcaacctggccccggtggtgaacgtcggccagaacctcgtggtggacctgtccacgcagatcttctgccacaacgactaccccgagaccatcaccgactacgtcaccctgcagcgcgggagcgcctacggcggcgtgctctccagcttcagcgggacggtgaagtactccggcagctcctaccccttccccaccaccagcgagaccccgcgggtcgtgtacaactcccgcacggacaagccctggcccgtggccctgtacctgacccccgtcagctccgccgggggcgtggcgatcaaggccgggagcctcatcgccgtgctgatcctgcggcagaccaacaactacaactccgacgacttccagttcgtctggaacatctacgcgaacaacgacgtggtggtcccgaccggcggctgcgacgtgagcgcccgcgacgtgacggtcaccctccccgactaccccgggtccgtgcccatcccgctgaccgtgtactgcgccaagagccagaacctgggctactacctctccgggaccacggccgacgccggcaacagcatcttcaccaacaccgcgtccttcagccccgcccagggcgtcggggtgcagctgacccggcagggcacgatcatccccgccgacaacaccgtcagcctgggggccgtgggcacctccgccgtgagcctcgggctgaccgcgaactacgcccgcacgggcggccaggtcaccgccgggaacgtgcagtccatcatcggcgtgaccttcgtctaccagcccggcgacgggaacgccgacgtgaccatcaccgtcaacggcaaggtggtggccaagagcggcgggatgcagatctacgagggcaagctgaccgccgaggggctccgcttcggcatcgtggccagccggttcaaccacgcgctggtcgaccgcctggtggagggggccatcgacgccatcgtgcggcacggcgggcgcgaggaggacatcaccctcgtccgggtgcccggctcctgggagatcccggtggccgccggcgagctggcccgcaaggaggacatcgacgcggtcatcgccatcggggtgctgatccggggcgccacgccccacttcgactacatcgccagcgaggtgtccaaggggctcgcggacctgagcctggagctccgcaagcccatcaccttcggcgtcatcaccgccgacaccctggagcaggccatcgagcgggccgggacgaagcacggcaacaagggctgggaggccgcgctgtccgccatcgagatggccaacctcttcaagagcctgcgctga

SEQ ID NO: 540 - RNA, 1422 nt, synthetic construct
  misc_feature 1..1422: note Artificial____HsIgE(1-18)_Ec(J96)-FimH(22-300_N28S_V48C_L55 C_N91S_N249Q)_Linker-PGDGN_Ec(J96)-FimG(24-37)_Linker-SGG_L umSynth(1-154_C37A_N102D) CDS opt1
  source 1..1422: mol_type = other RNA
atggactggacctggatcctgttcctcgtggccgccgcgacccgcgtccacagcttcgcctgcaagaccgccagcggcaccgcgatccccatcgggggcgggagcgccaacgtgtacgtcaacctggccccgtgcgtgaacgtcggccagaactgcgtggtggacctgtccacgcagatcttctgccacaacgactaccccgagaccatcaccgactacgtcaccctgcagcgcgggagcgcctacggcggcgtgctctccagcttcagcgggacggtgaagtactccggcagctcctaccccttccccaccaccagcgagaccccgcgggtcgtgtacaactcccgcacggacaagccctggcccgtggccctgtacctgacccccgtcagctccgccgggggcgtggcgatcaaggccgggagcctcatcgccgtgctgatcctgcggcagaccaacaactacaactccgacgacttccagttcgtctggaacatctacgcgaacaacgacgtggtggtcccgaccggcggctgcgacgtgagcgcccgcgacgtgacggtcaccctccccgactaccccgggtccgtgcccatcccgctgaccgtgtactgcgccaagagccagaacctgggctactacctctccgggaccacggccgacgccggcaacagcatcttcaccaacaccgcgtccttcagccccgcccagggcgtcggggtgcagctgacccggcagggcacgatcatccccgccaacaacaccgtcagcctgggggccgtgggcacctccgccgtgagcctcgggctgaccgcgaactacgcccgcacgggcggccaggtcaccgccgggaacgtgcagtccatcatcggcgtgaccttcgtctaccagcccggcgacgggaacgccgacgtgaccatcaccgtcaacggcaaggtggtggccaagagcggcgggatgcagatctacgagggcaagctgaccgccgaggggctccgcttcggcatcgtggccagccggttcaaccacgcgctggtcgaccgcctggtggagggggccatcgacgccatcgtgcggcacggcgggcgcgaggaggacatcaccctcgtccgggtgcccggctcctgggagatcccggtggccgccggcgagctggcccgcaaggaggacatcgacgcggtcatcgccatcggggtgctgatccggggcgccacgccccacttcgactacatcgccagcgaggtgtccaaggggctcgcggacctgagcctggagctccgcaagcccatcaccttcggcgtcatcaccgccgacaccctggagcaggccatcgagcgggccgggacgaagcacggcaacaagggctgggaggccgcgctgtccgccatcgagatggccaacctcttcaagagcctgcgctga

SEQ ID NO: 541 - RNA, 1422 nt, synthetic construct
  misc_feature 1..1422: note Artificial____HsIgE(1-18)_Ec(J96)-FimH(22-300_F165V)_Linker -PGDGN_Ec(J96)-FimG(24-37)_Linker-SGG_LumSynth(1-154_C37A_N 102D) CDS opt1
  source 1..1422: mol_type = other RNA
atggactggacctggatcctgttcctcgtggccgccgcgacccgcgtccacagcttcgcctgcaagaccgccaacggcaccgcgatccccatcgggggcgggagcgccaacgtgtacgtcaacctggccccggtggtgaacgtcggccagaacctcgtggtggacctgtccacgcagatcttctgccacaacgactaccccgagaccatcaccgactacgtcaccctgcagcgcgggagcgcctacggcggcgtgctctccaacttcagcgggacggtgaagtactccggcagctcctaccccttccccaccaccagcgagaccccgcgggtcgtgtacaactcccgcacggacaagccctggcccgtggccctgtacctgacccccgtcagctccgccgggggcgtggcgatcaaggccgggagcctcatcgccgtgctgatcctgcggcagaccaacaactacaactccgacgacttccaggtggtctggaacatctacgcgaacaacgacgtggtggtcccgaccggcggctgcgacgtgagcgcccgcgacgtgacggtcaccctccccgactaccccgggtccgtgcccatcccgctgaccgtgtactgcgccaagagccagaacctgggctactacctctccgggaccacggccgacgccggcaacagcatcttcaccaacaccgcgtccttcagccccgcccagggcgtcggggtgcagctgacccggaacggcacgatcatccccgccaacaacaccgtcagcctgggggccgtgggcacctccgccgtgagcctcgggctgaccgcgaactacgcccgcacgggcggccaggtcaccgccgggaacgtgcagtccatcatcggcgtgaccttcgtctaccagcccggcgacgggaacgccgacgtgaccatcaccgtcaacggcaaggtggtggccaagagcggcgggatgcagatctacgagggcaagctgaccgccgaggggctccgcttcggcatcgtggccagccggttcaaccacgcgctggtcgaccgcctggtggagggggccatcgacgccatcgtgcggcacggcgggcgcgaggaggacatcaccctcgtccgggtgcccggctcctgggagatcccggtggccgccggcgagctggcccgcaaggaggacatcgacgcggtcatcgccatcggggtgctgatccggggcgccacgccccacttcgactacatcgccagcgaggtgtccaaggggctcgcggacctgagcctggagctccgcaagcccatcaccttcggcgtcatcaccgccgacaccctggagcaggccatcgagcgggccgggacgaagcacggcaacaagggctgggaggccgcgctgtccgccatcgagatggccaacctcttcaagagcctgcgctga

SEQ ID NO: 542 - RNA, 1449 nt, synthetic construct
  misc_feature 1..1449: note Artificial____HsIgE(1-18)_Ec(J96)-FimH(22-300_N28S_N91S_N24 9Q)_Linker-PGDGN_Ec(J96)-FimG(24-37)_Linker-SGG_Ferritin(5- 167_N19Q) CDS opt1
  source 1..1449: mol_type = other RNA
atggactggacctggatcctgttcctcgtggccgccgcgacccgcgtccacagcttcgcctgcaagaccgccagcggcaccgcgatccccatcgggggcgggagcgccaacgtgtacgtcaacctggccccggtggtgaacgtcggccagaacctcgtggtggacctgtccacgcagatcttctgccacaacgactaccccgagaccatcaccgactacgtcaccctgcagcgcgggagcgcctacggcggcgtgctctccagcttcagcgggacggtgaagtactccggcagctcctaccccttccccaccaccagcgagaccccgcgggtcgtgtacaactcccgcacggacaagccctggcccgtggccctgtacctgacccccgtcagctccgccgggggcgtggcgatcaaggccgggagcctcatcgccgtgctgatcctgcggcagaccaacaactacaactccgacgacttccagttcgtctggaacatctacgcgaacaacgacgtggtggtcccgaccggcggctgcgacgtgagcgcccgcgacgtgacggtcaccctccccgactaccccgggtccgtgcccatcccgctgaccgtgtactgcgccaagagccagaacctgggctactacctctccgggaccacggccgacgccggcaacagcatcttcaccaacaccgcgtccttcagccccgcccagggcgtcggggtgcagctgacccggcagggcacgatcatccccgccaacaacaccgtcagcctgggggccgtgggcacctccgccgtgagcctcgggctgaccgcgaactacgcccgcacgggcggccaggtcaccgccgggaacgtgcagtccatcatcggcgtgaccttcgtctaccagcccggcgacgggaacgccgacgtgaccatcaccgtcaacggcaaggtggtggccaagagcggcggggacatcatcaagctcctgaacgagcaggtcaacaaggagatgcagtccagcaacctgtacatgtccatgagctcctggtgctacacccacagcctcgacggcgccgggctgttcctgttcgaccacgccgcggaggagtacgagcacgccaagaagctcatcatcttcctgaacgagaacaacgtgcccgtgcagctgacctccatcagcgccccggagcacaagttcgagggcctcacgcagatcttccagaaggcctacgagcacgagcagcacatctccgagagcatcaacaacatcgtggaccacgccatcaagtccaaggaccacgcgaccttcaacttcctgcagtggtacgtcgccgagcagcacgaggaggaggtgctgttcaaggacatcctcgacaagatcgagctgatcgggaacgagaaccacggcctgtacctcgccgaccagtacgtgaaggggatcgccaagagccgcaagtcctga

SEQ ID NO: 543 - RNA, 1449 nt, synthetic construct
  misc_feature 1..1449: note Artificial____HsIgE(1-18)_Ec(J96)-FimH(22-300_N28S_N91S_N24 9Q_N256D)_Linker-PGDGN_Ec(J96)-FimG(24-37)_Linker-SGG_Ferri tin(5-167_N19Q) CDS opt1
  source 1..1449: mol_type = other RNA
atggactggacctggatcctgttcctcgtggccgccgcgacccgcgtccacagcttcgcctgcaagaccgccagcggcaccgcgatccccatcgggggcgggagcgccaacgtgtacgtcaacctggccccggtggtgaacgtcggccagaacctcgtggtggacctgtccacgcagatcttctgccacaacgactaccccgagaccatcaccgactacgtcaccctgcagcgcgggagcgcctacggcggcgtgctctccagcttcagcgggacggtgaagtactccggcagctcctaccccttccccaccaccagcgagaccccgcgggtcgtgtacaactcccgcacggacaagccctggcccgtggccctgtacctgacccccgtcagctccgccgggggcgtggcgatcaaggccgggagcctcatcgccgtgctgatcctgcggcagaccaacaactacaactccgacgacttccagttcgtctggaacatctacgcgaacaacgacgtggtggtcccgaccggcggctgcgacgtgagcgcccgcgacgtgacggtcaccctccccgactaccccgggtccgtgcccatcccgctgaccgtgtactgcgccaagagccagaacctgggctactacctctccgggaccacggccgacgccggcaacagcatcttcaccaacaccgcgtccttcagccccgcccagggcgtcggggtgcagctgacccggcagggcacgatcatccccgccgacaacaccgtcagcctgggggccgtgggcacctccgccgtgagcctcgggctgaccgcgaactacgcccgcacgggcggccaggtcaccgccgggaacgtgcagtccatcatcggcgtgaccttcgtctaccagcccggcgacgggaacgccgacgtgaccatcaccgtcaacggcaaggtggtggccaagagcggcggggacatcatcaagctcctgaacgagcaggtcaacaaggagatgcagtccagcaacctgtacatgtccatgagctcctggtgctacacccacagcctcgacggcgccgggctgttcctgttcgaccacgccgcggaggagtacgagcacgccaagaagctcatcatcttcctgaacgagaacaacgtgcccgtgcagctgacctccatcagcgccccggagcacaagttcgagggcctcacgcagatcttccagaaggcctacgagcacgagcagcacatctccgagagcatcaacaacatcgtggaccacgccatcaagtccaaggaccacgcgaccttcaacttcctgcagtggtacgtcgccgagcagcacgaggaggaggtgctgttcaaggacatcctcgacaagatcgagctgatcgggaacgagaaccacggcctgtacctcgccgaccagtacgtgaaggggatcgccaagagccgcaagtcctga

SEQ ID NO: 544 - RNA, 1449 nt, synthetic construct
  misc_feature 1..1449: note Artificial____HsIgE(1-18)_Ec(J96)-FimH(22-300_N28S_V48C_L55 C_N91S_N249Q)_Linker-PGDGN_Ec(J96)-FimG(24-37)_Linker-SGG_F erritin(5-167_N19Q) CDS opt1
  source 1..1449: mol_type = other RNA
atggactggacctggatcctgttcctcgtggccgccgcgacccgcgtccacagcttcgcctgcaagaccgccagcggcaccgcgatccccatcgggggcgggagcgccaacgtgtacgtcaacctggccccgtgcgtgaacgtcggccagaactgcgtggtggacctgtccacgcagatcttctgccacaacgactaccccgagaccatcaccgactacgtcaccctgcagcgcgggagcgcctacggcggcgtgctctccagcttcagcgggacggtgaagtactccggcagctcctaccccttccccaccaccagcgagaccccgcgggtcgtgtacaactcccgcacggacaagccctggcccgtggccctgtacctgacccccgtcagctccgccgggggcgtggcgatcaaggccgggagcctcatcgccgtgctgatcctgcggcagaccaacaactacaactccgacgacttccagttcgtctggaacatctacgcgaacaacgacgtggtggtcccgaccggcggctgcgacgtgagcgcccgcgacgtgacggtcaccctccccgactaccccgggtccgtgcccatcccgctgaccgtgtactgcgccaagagccagaacctgggctactacctctccgggaccacggccgacgccggcaacagcatcttcaccaacaccgcgtccttcagccccgcccagggcgtcggggtgcagctgacccggcagggcacgatcatccccgccaacaacaccgtcagcctgggggccgtgggcacctccgccgtgagcctcgggctgaccgcgaactacgcccgcacgggcggccaggtcaccgccgggaacgtgcagtccatcatcggcgtgaccttcgtctaccagcccggcgacgggaacgccgacgtgaccatcaccgtcaacggcaaggtggtggccaagagcggcggggacatcatcaagctcctgaacgagcaggtcaacaaggagatgcagtccagcaacctgtacatgtccatgagctcctggtgctacacccacagcctcgacggcgccgggctgttcctgttcgaccacgccgcggaggagtacgagcacgccaagaagctcatcatcttcctgaacgagaacaacgtgcccgtgcagctgacctccatcagcgccccggagcacaagttcgagggcctcacgcagatcttccagaaggcctacgagcacgagcagcacatctccgagagcatcaacaacatcgtggaccacgccatcaagtccaaggaccacgcgaccttcaacttcctgcagtggtacgtcgccgagcagcacgaggaggaggtgctgttcaaggacatcctcgacaagatcgagctgatcgggaacgagaaccacggcctgtacctcgccgaccagtacgtgaaggggatcgccaagagccgcaagtcctga

SEQ ID NO: 545 - RNA, 1449 nt, synthetic construct
  misc_feature 1..1449: note Artificial____HsIgE(1-18)_Ec(J96)-FimH(22-300_F165V)_Linker -PGDGN_Ec(J96)-FimG(24-37)_Linker-SGG_Ferritin(5-167_N19Q) CDS opt1
  source 1..1449: mol_type = other RNA
atggactggacctggatcctgttcctcgtggccgccgcgacccgcgtccacagcttcgcctgcaagaccgccaacggcaccgcgatccccatcgggggcgggagcgccaacgtgtacgtcaacctggccccggtggtgaacgtcggccagaacctcgtggtggacctgtccacgcagatcttctgccacaacgactaccccgagaccatcaccgactacgtcaccctgcagcgcgggagcgcctacggcggcgtgctctccaacttcagcgggacggtgaagtactccggcagctcctaccccttccccaccaccagcgagaccccgcgggtcgtgtacaactcccgcacggacaagccctggcccgtggccctgtacctgacccccgtcagctccgccgggggcgtggcgatcaaggccgggagcctcatcgccgtgctgatcctgcggcagaccaacaactacaactccgacgacttccaggtggtctggaacatctacgcgaacaacgacgtggtggtcccgaccggcggctgcgacgtgagcgcccgcgacgtgacggtcaccctccccgactaccccgggtccgtgcccatcccgctgaccgtgtactgcgccaagagccagaacctgggctactacctctccgggaccacggccgacgccggcaacagcatcttcaccaacaccgcgtccttcagccccgcccagggcgtcggggtgcagctgacccggaacggcacgatcatccccgccaacaacaccgtcagcctgggggccgtgggcacctccgccgtgagcctcgggctgaccgcgaactacgcccgcacgggcggccaggtcaccgccgggaacgtgcagtccatcatcggcgtgaccttcgtctaccagcccggcgacgggaacgccgacgtgaccatcaccgtcaacggcaaggtggtggccaagagcggcggggacatcatcaagctcctgaacgagcaggtcaacaaggagatgcagtccagcaacctgtacatgtccatgagctcctggtgctacacccacagcctcgacggcgccgggctgttcctgttcgaccacgccgcggaggagtacgagcacgccaagaagctcatcatcttcctgaacgagaacaacgtgcccgtgcagctgacctccatcagcgccccggagcacaagttcgagggcctcacgcagatcttccagaaggcctacgagcacgagcagcacatctccgagagcatcaacaacatcgtggaccacgccatcaagtccaaggaccacgcgaccttcaacttcctgcagtggtacgtcgccgagcagcacgaggaggaggtgctgttcaaggacatcctcgacaagatcgagctgatcgggaacgagaaccacggcctgtacctcgccgaccagtacgtgaaggggatcgccaagagccgcaagtcctga

SEQ ID NO: 546 - RNA, 726 nt, synthetic construct; identical to SEQ ID NO: 320
  misc_feature 1..726: note Artificial____Ec(J96)-FimC(1-36)_Ec(J96)-FimC(37-241) CDS opt1
  source 1..726: mol_type = other RNA

SEQ ID NO: 547 - RNA, 672 nt, synthetic construct
  misc_feature 1..672: note = Artificial____HsIgE(1-18)_Ec(J96)-FimC(37-241) CDS opt1
  source 1..672: mol_type = other RNA
atggactggacctggatcctgttcctcgtggccgccgcgacccgcgtccacagcggcgtggccctgggggccacgcgggtgatctaccccgccggccagaagcaggtccagctggccgtgaccaacaacgacgagaactccacctacctcatccagagctgggtggagaacgcggacggggtcaaggacggccgcttcatcgtgaccccgcccctgttcgccatgaaggggaagaaggagaacacgctgcggatcctcgacgccaccaacaaccagctgccccaggaccgcgagtccctgttctggatgaacgtgaaggccatccccagcatggacaagtccaagctcaccgagaacaccctgcagctggcgatcatcagccggatcaagctctactaccgcccggccaagctggccctgccgcccgaccaggccgccgagaagctccggttccgccggtccgcgaacagcctgacgctgatcaaccccaccccctactacctcaccgtcaccgagctgaacgccggcacgcgcgtgctggagaacgccctcgtgccgcccatgggcgagtccaccgtcaagctgcccagcgacgccgggtccaacatcacctaccggaccatcaacgactacggcgccctgacgcccaagatgaccggggtgatggagtga

SEQ ID NO: 548 - RNA, 903 nt, synthetic construct; identical to SEQ ID NO: 207
  misc_feature 1..903: note Artificial____Ec(J96)-FimH(1-21)_Ec(J96)-FimH(22-300) CDS opt1
  source 1..903: mol_type = other RNA

SEQ ID NO: 549 - RNA, 894 nt, synthetic construct
  misc_feature 1..894: note = Artificial____HsIgE(1-18)_Ec(J96)-FimH(22-300) CDS opt1
  source 1..894: mol_type = other RNA
atggactggacctggatcctgttcctcgtggccgccgcgacccgcgtccacagcttcgcctgcaagacggccaacggcaccgccatccccatcgggggcgggtccgccaacgtgtacgtgaacctggcgccggtcgtgaacgtgggccagaacctggtcgtggacctcagcacccagatcttctgccacaacgactaccccgagaccatcacggactacgtgaccctgcagcgggggtccgcctacggcggcgtcctgagcaacttctccgggaccgtgaagtacagcggctccagctaccccttccccaccacgtccgagaccccgcgcgtggtctacaacagccggaccgacaagccctggcccgtggccctctacctgacccccgtgtccagcgccgggggcgtcgcgatcaaggccgggtccctgatcgccgtgctcatcctgcgccagacgaacaactacaacagcgacgacttccagttcgtgtggaacatctacgccaacaacgacgtcgtggtgccgaccggcggctgcgacgtctccgcccgggacgtgaccgtgaccctgcccgactaccccgggagcgtccccatcccgctcacggtgtactgcgcgaagtcccagaacctgggctactacctgagcgggaccaccgccgacgccggcaactccatcttcaccaacacggccagcttcagccccgcccagggcgtcggggtgcagctcacccgcaacggcaccatcatccccgcgaacaacaccgtgtccctgggggccgtcggcacgagcgccgtgtccctggggctcaccgccaactacgcccggaccggcggccaggtgaccgcggggaacgtccagagcatcatcggcgtgacgttcgtgtaccagtga

SEQ ID NO: 550 - RNA, 900 nt, synthetic construct
  misc_feature 1..900: note = Artificial____MmIgK(1-20)_Ec(J96)-FimH(22-300) CDS opt1
  source 1..900: mol_type = other RNA
atggagaccgacaccctgctcctgtgggtgctgctcctgtgggtccccggcagcacggggttcgcctgcaagaccgccaacggcaccgcgatcccgatcgggggcgggtccgccaacgtgtacgtgaacctggcccccgtcgtgaacgtgggccagaacctcgtcgtggacctgagcacccagatcttctgccacaacgactaccccgagacgatcaccgactacgtgaccctgcagcgcggctccgcctacgggggcgtcctcagcaacttctccgggaccgtgaagtacagcggctccagctaccccttcccgacgacctccgagacgccccgggtggtctacaacagccgcaccgacaagccctggcccgtggccctgtacctgaccccggtgtccagcgccgggggcgtcgcgatcaaggccggctccctcatcgccgtgctgatcctgcggcagaccaacaactacaacagcgacgacttccagttcgtgtggaacatctacgcgaacaacgacgtcgtggtgcccaccgggggctgcgacgtctccgcccgcgacgtgaccgtgacgctccccgactaccccgggagcgtcccgatccccctgaccgtgtactgcgccaagtcccagaacctgggctactacctcagcggcaccaccgccgacgccgggaactccatcttcacgaacaccgcgagcttcagccccgcccagggcgtcggggtgcagctgacccggaacggcaccatcatccccgccaacaacacggtgtccctgggggccgtcggcaccagcgccgtgtccctcggcctgaccgcgaactacgcccgcaccgggggccaggtgacggccgggaacgtccagagcatcatcggcgtgaccttcgtgtaccagtga

SEQ ID NO: 551 - RNA, 960 nt, synthetic construct
  misc_feature 1..960: note Artificial____Ec(J96)-FimH(1-21)_Ec(J96)-FimH(22-300)_Linke r-PGDGN_Ec(J96)-FimG(24-37) CDS opt1
  source 1..960: mol_type = other RNA
atgaagcgcgtgatcaccctgttcgccgtcctcctgatgggctggagcgtgaacgcctggtccttcgcgtgcaagaccgccaacgggacggccatccccatcggcgggggcagcgccaacgtgtacgtcaacctggccccggtggtgaacgtcgggcagaacctcgtggtggacctgtccacccagatcttctgccacaacgactaccccgagaccatcaccgactacgtcacgctgcagcggggcagcgcgtacggcggggtgctctccaacttcagcggcaccgtgaagtactccgggagctcctaccccttccccaccaccagcgagacgccgcgcgtcgtgtacaactcccggaccgacaagccctggcccgtggccctgtacctgacccccgtcagctccgccggcggggtggccatcaaggcgggcagcctcatcgccgtgctgatcctgcgccagaccaacaactacaactccgacgacttccagttcgtctggaacatctacgccaacaacgacgtggtggtcccgacgggcgggtgcgacgtgagcgcccgggacgtgaccgtcaccctccccgactaccccggctccgtgcccatcccgctgaccgtctactgcgccaagagccagaacctggggtactacctctccggcacgaccgcggacgccggcaacagcatcttcaccaacaccgccagcttctcccccgcccagggggtgggcgtgcagctgacgcgcaacgggaccatcatccccgccaacaacaccgtcagcctgggcgcggtggggacctccgccgtgagcctcggcctgacggccaactacgcccggaccggcgggcaggtcaccgccggcaacgtgcagtccatcatcggggtgaccttcgtctaccagcccggcgacgggaacgcggacgtgacgatcaccgtgaacggcaaggtcgtggccaagtga

SEQ ID NO: 552 - RNA, 951 nt, synthetic construct
  misc_feature 1..951: note Artificial____HsIgE(1-18)_Ec(J96)-FimH(22-300)_Linker-PGDGN _Ec(J96)-FimG(24-37) CDS opt1
  source 1..951: mol_type = other RNA
atggactggacctggatcctgttcctcgtggccgccgcgacccgcgtccacagcttcgcctgcaagacggccaacggcaccgccatccccatcgggggcgggtccgccaacgtgtacgtgaacctggcgccggtcgtgaacgtgggccagaacctggtcgtggacctcagcacccagatcttctgccacaacgactaccccgagaccatcacggactacgtgaccctgcagcgggggtccgcctacggcggcgtcctgagcaacttctccgggaccgtgaagtacagcggctccagctaccccttccccaccacgtccgagaccccgcgcgtggtctacaacagccggaccgacaagccctggcccgtggccctctacctgacccccgtgtccagcgccgggggcgtcgcgatcaaggccgggtccctgatcgccgtgctcatcctgcgccagacgaacaactacaacagcgacgacttccagttcgtgtggaacatctacgccaacaacgacgtcgtggtgccgaccggcggctgcgacgtctccgcccgggacgtgaccgtgaccctgcccgactaccccgggagcgtccccatcccgctcacggtgtactgcgcgaagtcccagaacctgggctactacctgagcgggaccaccgccgacgccggcaactccatcttcaccaacacggccagcttcagccccgcccagggcgtcggggtgcagctcacccgcaacggcaccatcatccccgcgaacaacaccgtgtccctgggggccgtcggcacgagcgccgtgtccctggggctcaccgccaactacgcccggaccggcggccaggtgaccgcggggaacgtccagagcatcatcggcgtgacgttcgtgtaccagcccggggacggcaacgccgacgtcaccatcaccgtgaacgggaaggtggtcgccaagtga

SEQ ID NO: 553 - RNA, 957 nt, synthetic construct
  misc_feature 1..957: note Artificial____HsIgE(1-18)_Ec(J96)-FimH(22-300)_Linker-G4SGG _Ec(J96)-FimG(24-37) CDS opt1
  source 1..957: mol_type = other RNA
atggactggacctggatcctgttcctcgtggccgccgcgacccgcgtccacagcttcgcctgcaagacggccaacggcaccgccatccccatcgggggcgggtccgccaacgtgtacgtgaacctggcgccggtcgtgaacgtgggccagaacctggtcgtggacctcagcacccagatcttctgccacaacgactaccccgagaccatcacggactacgtgaccctgcagcgggggtccgcctacggcggcgtcctgagcaacttctccgggaccgtgaagtacagcggctccagctaccccttccccaccacgtccgagaccccgcgcgtggtctacaacagccggaccgacaagccctggcccgtggccctctacctgacccccgtgtccagcgccgggggcgtcgcgatcaaggccgggtccctgatcgccgtgctcatcctgcgccagacgaacaactacaacagcgacgacttccagttcgtgtggaacatctacgccaacaacgacgtcgtggtgccgaccggcggctgcgacgtctccgcccgggacgtgaccgtgaccctgcccgactaccccgggagcgtccccatcccgctcacggtgtactgcgcgaagtcccagaacctgggctactacctgagcgggaccaccgccgacgccggcaactccatcttcaccaacacggccagcttcagccccgcccagggcgtcggggtgcagctcacccgcaacggcaccatcatccccgcgaacaacaccgtgtccctgggggccgtcggcacgagcgccgtgtccctggggctcaccgccaactacgcccggaccggcggccaggtgaccgcggggaacgtccagagcatcatcggcgtgacgttcgtgtaccagggcgggggcgggtccggcggggccgacgtcaccatcaccgtgaacggcaaggtggtcgccaagtga

SEQ ID NO: 554 - RNA, 957 nt, synthetic construct
  misc_feature 1..957: note Artificial____MmIgK(1-20)_Ec(J96)-FimH(22-300)_Linker-PGDGN _Ec(J96)-FimG(24-37) CDS opt1
  source 1..957: mol_type = other RNA
atggagaccgacaccctgctcctgtgggtgctgctcctgtgggtccccggcagcacggggttcgcctgcaagaccgccaacggcaccgcgatcccgatcgggggcgggtccgccaacgtgtacgtgaacctggcccccgtcgtgaacgtgggccagaacctcgtcgtggacctgagcacccagatcttctgccacaacgactaccccgagacgatcaccgactacgtgaccctgcagcgcggctccgcctacgggggcgtcctcagcaacttctccgggaccgtgaagtacagcggctccagctaccccttcccgacgacctccgagacgccccgggtggtctacaacagccgcaccgacaagccctggcccgtggccctgtacctgaccccggtgtccagcgccgggggcgtcgcgatcaaggccggctccctcatcgccgtgctgatcctgcggcagaccaacaactacaacagcgacgacttccagttcgtgtggaacatctacgcgaacaacgacgtcgtggtgcccaccgggggctgcgacgtctccgcccgcgacgtgaccgtgacgctccccgactaccccgggagcgtcccgatccccctgaccgtgtactgcgccaagtcccagaacctgggctactacctcagcggcaccaccgccgacgccgggaactccatcttcacgaacaccgcgagcttcagccccgcccagggcgtcggggtgcagctgacccggaacggcaccatcatccccgccaacaacacggtgtccctgggggccgtcggcaccagcgccgtgtccctcggcctgaccgcgaactacgcccgcaccgggggccaggtgacggccgggaacgtccagagcatcatcggcgtgaccttcgtgtaccagccgggggacggcaacgccgacgtcaccatcaccgtgaacggcaaggtggtcgccaagtga

SEQ ID NO: 555 - RNA, 957 nt, synthetic construct
  misc_feature 1..957: note Artificial____MmIgK(1-20)_Ec(536)-FimH(22-300)_Linker-PGDGN _Ec(J96)-FimG(24-37) CDS opt1
  source 1..957: mol_type = other RNA
atggagaccgacaccctgctcctgtgggtgctgctcctgtgggtccccggcagcacggggttcgcctgcaagaccgccaacggcaccgcgatcccgatcgggggcgggtccgccaacgtgtacgtgaacctggcccccgccgtcaacgtgggccagaacctcgtggtcgacctgagcacccagatcttctgccacaacgactaccccgagacgatcaccgactacgtgaccctgcagcgcggctccgcctacgggggcgtgctcagctccttcagcgggaccgtcaagtacaacggctccagctaccccttcccgacgacctccgagacgccccgggtggtgtacaacagccgcaccgacaagccctggcccgtcgcgctgtacctgaccccggtgtccagcgccgggggcgtggccatcaaggccggctccctcatcgcggtcctgatcctgcggcagaccaacaactacaacagcgacgacttccagttcgtgtggaacatctacgccaacaacgacgtggtcgtgcccaccgggggctgcgacgtgtccgcccgcgacgtcaccgtgacgctccccgactaccccgggagcgtgccgatccccctgaccgtctactgcgccaagtcccagaacctgggctactacctcagcggcaccaccgccgacgcggggaactccatcttcacgaacaccgccagcttcagccccgcccagggcgtgggggtccagctgacccggaacggcaccatcatccccgccaacaacacggtgtccctgggggccgtgggcaccagcgcggtctccctcggcctgaccgccaactacgcccgcaccgggggccaggtgacggccgggaacgtgcagagcatcatcggcgtcaccttcgtgtaccagccgggggacggcaacgccgacgtgaccatcaccgtcaacggcaaggtggtggcgaagtga

SEQ ID NO: 556 - RNA, 981 nt, synthetic construct
  misc_feature 1..981: note Artificial____HsIgE(1-18)_Ec(J96)-FimH(22-300)_Linker-(G4S) 3_Ec(J96)-FimC(135-148) CDS opt1
  source 1..981: mol_type = other RNA
atggactggacctggatcctgttcctcgtggccgccgcgacccgcgtccacagcttcgcctgcaagacggccaacggcaccgccatccccatcgggggcgggtccgccaacgtgtacgtgaacctggcgccggtcgtgaacgtgggccagaacctggtcgtggacctcagcacccagatcttctgccacaacgactaccccgagaccatcacggactacgtgaccctgcagcgggggtccgcctacggcggcgtcctgagcaacttctccgggaccgtgaagtacagcggctccagctaccccttccccaccacgtccgagaccccgcgcgtggtctacaacagccggaccgacaagccctggcccgtggccctctacctgacccccgtgtccagcgccgggggcgtcgcgatcaaggccgggtccctgatcgccgtgctcatcctgcgccagacgaacaactacaacagcgacgacttccagttcgtgtggaacatctacgccaacaacgacgtcgtggtgccgaccggcggctgcgacgtctccgcccgggacgtgaccgtgaccctgcccgactaccccgggagcgtccccatcccgctcacggtgtactgcgcgaagtcccagaacctgggctactacctgagcgggaccaccgccgacgccggcaactccatcttcaccaacacggccagcttcagccccgcccagggcgtcggggtgcagctcacccgcaacggcaccatcatccccgcgaacaacaccgtgtccctgggggccgtcggcacgagcgccgtgtccctggggctcaccgccaactacgcccggaccggcggccaggtgaccgcggggaacgtccagagcatcatcggcgtgacgttcgtgtaccagggcgggggcgggtccggcgggggcgggagcggcgggggcggctccaccgagaacaccctgcagctggccatcatcagccgcatcaagtga

SEQ ID NO: 557 - RNA, 1404 nt, synthetic construct
  misc_feature 1..1404: note Artificial____LumSynth(1-154_C37A_N102D)_Linker(GGS)4-GGG_E c(J96)-FimH(22-300)_Linker-PGDGN_Ec(J96)-FimG(24-37) CDS opt1
  source 1..1404: mol_type = other RNA
atgcagatctacgagggcaagctgaccgccgaggggctccgcttcggcatcgtggccagccggttcaaccacgcgctggtcgaccgcctggtggagggggccatcgacgccatcgtgcggcacggcgggcgcgaggaggacatcaccctcgtccgggtgcccggctcctgggagatcccggtggccgccggcgagctggcgcgcaaggaggacatcgacgccgtcatcgccatcggggtgctgatccggggcgccacgccccacttcgactacatcgcgagcgaggtgtccaaggggctcgccgacctgagcctggagctccgcaagcccatcaccttcggcgtcatcaccgccgacaccctggagcaggccatcgagcgggccgggacgaagcacggcaacaagggctgggaggcggccctgtccgccatcgagatggccaacctcttcaagagcctgcgcgggggctccgggggcagcggcgggtccggcgggagcggcgggggcttcgcctgcaagaccgcgaacggcaccgccatccccatcgggggcgggtccgccaacgtgtacgtgaacctggccccggtcgtgaacgtgggccagaacctcgtcgtggacctgagcacccagatcttctgccacaacgactaccccgagacgatcaccgactacgtgaccctgcagcgggggtccgcctacggcggcgtcctcagcaacttctccgggaccgtgaagtacagcggctccagctaccccttccccacgacctccgagaccccgcgcgtggtctacaacagccggaccgacaagccctggcccgtggcgctgtacctgacgcccgtgagctccgccgggggcgtcgccatcaaggccgggagcctcatcgccgtgctgatcctgcgccagaccaacaactacaactccgacgacttccagttcgtctggaacatctacgcgaacaacgacgtggtggtcccgaccggcggctgcgacgtgagcgcccgggacgtgaccgtcacgctccccgactaccccgggtccgtgcccatcccgctgaccgtgtactgcgccaagagccagaacctgggctactacctctccgggaccaccgccgacgcgggcaacagcatcttcacgaacaccgcctccttcagccccgcccagggcgtcggggtgcagctgacccgcaacggcaccatcatccccgccaacaacacggtgtccctgggggccgtcggcaccagcgcggtgtccctcgggctgaccgccaactacgcccggaccggcggccaggtgacggccgggaacgtccagagcatcatcggcgtgaccttcgtgtaccagcccggggacggcaacgccgacgtcaccatcaccgtgaacgggaaggtggtcgcgaagtga

SEQ ID NO: 558 - RNA, 1422 nt, synthetic construct
  misc_feature 1..1422: note Artificial____HsIgE(1-18)_Ec(J96)-FimH(22-300)_Linker-PGDGN _Ec(J96)-FimG(24-37)_Linker-SGG_LumSynth(1-154_C37A_N102D) CDS opt1
  source 1..1422: mol_type = other RNA
atggactggacctggatcctgttcctcgtggccgccgcgacccgcgtccacagcttcgcctgcaagacggccaacggcaccgccatccccatcgggggcgggtccgccaacgtgtacgtgaacctggcgccggtcgtgaacgtgggccagaacctggtcgtggacctcagcacccagatcttctgccacaacgactaccccgagaccatcacggactacgtgaccctgcagcgggggtccgcctacggcggcgtcctgagcaacttctccgggaccgtgaagtacagcggctccagctaccccttccccaccacgtccgagaccccgcgcgtggtctacaacagccggaccgacaagccctggcccgtggccctctacctgacccccgtgtccagcgccgggggcgtcgcgatcaaggccgggtccctgatcgccgtgctcatcctgcgccagacgaacaactacaacagcgacgacttccagttcgtgtggaacatctacgccaacaacgacgtcgtggtgccgaccggcggctgcgacgtctccgcccgggacgtgaccgtgaccctgcccgactaccccgggagcgtccccatcccgctcacggtgtactgcgcgaagtcccagaacctgggctactacctgagcgggaccaccgccgacgccggcaactccatcttcaccaacacggccagcttcagccccgcccagggcgtcggggtgcagctcacccgcaacggcaccatcatccccgcgaacaacaccgtgtccctgggggccgtcggcacgagcgccgtgtccctggggctcaccgccaactacgcccggaccggcggccaggtgaccgcggggaacgtccagagcatcatcggcgtgacgttcgtgtaccagcccggggacggcaacgccgacgtcaccatcaccgtgaacgggaaggtggtcgccaagtccggcggcatgcagatctacgaggggaagctgaccgccgagggcctgcgcttcgggatcgtggccagccggttcaaccacgcgctcgtggaccgcctggtcgagggcgccatcgacgccatcgtgcggcacgggggccgcgaggaggacatcacgctggtgcgggtcccgggctcctgggagatccccgtggccgcgggggagctcgcccgcaaggaggacatcgacgccgtgatcgccatcggcgtcctgatccgcggggccacgccccacttcgactacatcgcgagcgaggtgtccaagggcctggccgacctcagcctggagctgcggaagcccatcaccttcggcgtgatcaccgccgacaccctcgagcaggccatcgagcgggccgggaccaagcacggcaacaaggggtgggaggcggccctgtccgccatcgagatggccaacctgttcaagagcctccgctga

SEQ ID NO: 559 - RNA, 1449 nt, synthetic construct
  misc_feature 1..1449: note Artificial____HsIgE(1-18)_Ec(J96)-FimH(22-300)_Linker-PGDGN _Ec(J96)-FimG(24-37)_Linker-SGG_Ferritin(5-167_N19Q) CDS opt1
  source 1..1449: mol_type = other RNA
atggactggacctggatcctgttcctcgtggccgccgcgacccgcgtccacagcttcgcctgcaagacggccaacggcaccgccatccccatcgggggcgggtccgccaacgtgtacgtgaacctggcgccggtcgtgaacgtgggccagaacctggtcgtggacctcagcacccagatcttctgccacaacgactaccccgagaccatcacggactacgtgaccctgcagcgggggtccgcctacggcggcgtcctgagcaacttctccgggaccgtgaagtacagcggctccagctaccccttccccaccacgtccgagaccccgcgcgtggtctacaacagccggaccgacaagccctggcccgtggccctctacctgacccccgtgtccagcgccgggggcgtcgcgatcaaggccgggtccctgatcgccgtgctcatcctgcgccagacgaacaactacaacagcgacgacttccagttcgtgtggaacatctacgccaacaacgacgtcgtggtgccgaccggcggctgcgacgtctccgcccgggacgtgaccgtgaccctgcccgactaccccgggagcgtccccatcccgctcacggtgtactgcgcgaagtcccagaacctgggctactacctgagcgggaccaccgccgacgccggcaactccatcttcaccaacacggccagcttcagccccgcccagggcgtcggggtgcagctcacccgcaacggcaccatcatccccgcgaacaacaccgtgtccctgggggccgtcggcacgagcgccgtgtccctggggctcaccgccaactacgcccggaccggcggccaggtgaccgcggggaacgtccagagcatcatcggcgtgacgttcgtgtaccagcccggggacggcaacgccgacgtcaccatcaccgtgaacgggaaggtggtcgccaagtccggcggcgacatcatcaagctgctgaacgagcaggtcaacaaggagatgcagagctccaacctctacatgagcatgtccagctggtgctacacccactccctggacggggccggcctgttcctcttcgaccacgccgcggaggagtacgagcacgccaagaagctgatcatcttcctgaacgagaacaacgtgccggtgcagctcacgagcatctccgcccccgagcacaagttcgaggggctgacccagatcttccagaaggcctacgagcacgagcagcacatcagcgagtccatcaacaacatcgtggaccacgcgatcaagagcaaggaccacgccaccttcaacttcctgcagtggtacgtggccgagcagcacgaggaggaggtcctcttcaaggacatcctggacaagatcgagctgatcggcaacgagaaccacgggctctacctggccgaccagtacgtgaagggcatcgccaagtcccgcaagagctga

SEQ ID NO: 560 - RNA, 1479 nt, synthetic construct
  misc_feature 1..1479: note Artificial____MmIgK(1-20)_Ec(J96)-FimH(22-300)_Linker-PGDGN _Ec(J96)-FimG(24-37)_Linker-(GGS)4_Ferritin(5-166) CDS opt1
  source 1..1479: mol_type = other RNA
atggagaccgacaccctgctcctgtgggtgctgctcctgtgggtccccggcagcacggggttcgcctgcaagaccgccaacggcaccgcgatcccgatcgggggcgggtccgccaacgtgtacgtgaacctggcccccgtcgtgaacgtgggccagaacctcgtcgtggacctgagcacccagatcttctgccacaacgactaccccgagacgatcaccgactacgtgaccctgcagcgcggctccgcctacgggggcgtcctcagcaacttctccgggaccgtgaagtacagcggctccagctaccccttcccgacgacctccgagacgccccgggtggtctacaacagccgcaccgacaagccctggcccgtggccctgtacctgaccccggtgtccagcgccgggggcgtcgcgatcaaggccggctccctcatcgccgtgctgatcctgcggcagaccaacaactacaacagcgacgacttccagttcgtgtggaacatctacgcgaacaacgacgtcgtggtgcccaccgggggctgcgacgtctccgcccgcgacgtgaccgtgacgctccccgactaccccgggagcgtcccgatccccctgaccgtgtactgcgccaagtcccagaacctgggctactacctcagcggcaccaccgccgacgccgggaactccatcttcacgaacaccgcgagcttcagccccgcccagggcgtcggggtgcagctgacccggaacggcaccatcatccccgccaacaacacggtgtccctgggggccgtcggcaccagcgccgtgtccctcggcctgaccgcgaactacgcccgcaccgggggccaggtgacggccgggaacgtccagagcatcatcggcgtgaccttcgtgtaccagccgggggacggcaacgccgacgtcaccatcaccgtgaacggcaaggtggtcgccaagggcgggtccgggggcagcgggggctccggcgggagcgacatcatcaagctgctcaacgagcaggtcaacaaggagatgaactccagcaacctgtacatgtccatgagctcctggtgctacacgcacagcctggacggcgcgggcctcttcctgttcgaccacgccgccgaggagtacgagcacgccaagaagctgatcatcttcctcaacgagaacaacgtgcccgtgcagctgacctccatcagcgcccccgagcacaagttcgaggggctgacccagatcttccagaaggcgtacgagcacgagcagcacatctccgagagcatcaacaacatcgtggaccacgccatcaagtccaaggaccacgccaccttcaacttcctccagtggtacgtggccgagcagcacgaggaggaggtcctgttcaaggacatcctggacaagatcgagctcatcggcaacgagaaccacgggctgtacctggcggaccagtacgtgaagggcatcgccaagagccggaagtga

SEQ ID NO: 561 - RNA, 1122 nt, synthetic construct
  misc_feature 1..1122: note Artificial____HsIgE(1-18)_Ec(J96)-FimH(22-300)_Linker-PGDGN _Ec(J96)-FimG(24-37)_TMdomain-HA(510-566) CDS opt1
  source 1..1122: mol_type = other RNA
atggactggacctggatcctgttcctcgtggccgccgcgacccgcgtccacagcttcgcctgcaagacggccaacggcaccgccatccccatcgggggcgggtccgccaacgtgtacgtgaacctggcgccggtcgtgaacgtgggccagaacctggtcgtggacctcagcacccagatcttctgccacaacgactaccccgagaccatcacggactacgtgaccctgcagcgggggtccgcctacggcggcgtcctgagcaacttctccgggaccgtgaagtacagcggctccagctaccccttccccaccacgtccgagaccccgcgcgtggtctacaacagccggaccgacaagccctggcccgtggccctctacctgacccccgtgtccagcgccgggggcgtcgcgatcaaggccgggtccctgatcgccgtgctcatcctgcgccagacgaacaactacaacagcgacgacttccagttcgtgtggaacatctacgccaacaacgacgtcgtggtgccgaccggcggctgcgacgtctccgcccgggacgtgaccgtgaccctgcccgactaccccgggagcgtccccatcccgctcacggtgtactgcgcgaagtcccagaacctgggctactacctgagcgggaccaccgccgacgccggcaactccatcttcaccaacacggccagcttcagccccgcccagggcgtcggggtgcagctcacccgcaacggcaccatcatccccgcgaacaacaccgtgtccctgggggccgtcggcacgagcgccgtgtccctggggctcaccgccaactacgcccggaccggcggccaggtgaccgcggggaacgtccagagcatcatcggcgtgacgttcgtgtaccagcccggggacggcaacgccgacgtcaccatcaccgtgaacgggaaggtggtcgccaaggccaagctgaaccgcgaggagatcgacggcgtgaagctggagtccacccggatctaccagatcctcgccatctacagcacggtggcgtccagcctggtcctggtggtgtccctcggcgccatcagcttctggatgtgctccaacgggagcctgcagtgccgcatctgcatctga

SEQ ID NO: 562 - RNA, 1455 nt, synthetic construct
  misc_feature 1..1455: note Artificial____HsIgE(1-18)_LumSynth(1-154_C37A_N102D)_Linker (GGS)4-GGG_Ec(J96)-FimH(22-300)_Linker-PGDGN_Ec(J96)-FimG(2 4-37) CDS opt1
  source 1..1455: mol_type = other RNA
atggactggacctggatcctgttcctcgtggccgccgcgacccgcgtccacagccagatctacgagggcaagctgacggccgaggggctgcggttcggcatcgtggcctcccgcttcaaccacgccctcgtggaccggctggtcgagggggccatcgacgcgatcgtgcgccacggcgggcgggaggaggacatcaccctggtgcgcgtccccggcagctgggagatcccggtggccgccggcgagctcgcccggaaggaggacatcgacgcggtgatcgccatcggggtcctgatccgcggcgccacgccccacttcgactacatcgcctccgaggtgagcaaggggctggccgacctctccctggagctgcggaagcccatcaccttcggcgtgatcaccgcggacaccctcgagcaggccatcgagcgcgccgggaccaagcacggcaacaagggctgggaggccgccctgagcgcgatcgagatggccaacctgttcaagtccctccgcgggggcagcgggggctccggcgggagcggcgggtccggcgggggcttcgcctgcaagaccgccaacggcacggccatccccatcgggggcgggagcgcgaacgtctacgtgaacctggccccggtggtcaacgtgggccagaacctggtggtcgacctctccacccagatcttctgccacaacgactaccccgagaccatcaccgactacgtgacgctgcagcgggggagcgcctacggcggcgtgctgtccaacttcagcgggaccgtcaagtactccggcagctcctaccccttccccaccaccagcgagacgccgcgggtggtgtacaacagccgcaccgacaagccctggcccgtcgccctctacctgacccccgtgtccagcgccgggggcgtcgcgatcaaggccgggtccctgatcgccgtgctcatcctgcggcagaccaacaactacaacagcgacgacttccagttcgtgtggaacatctacgccaacaacgacgtcgtggtgccgacgggcggctgcgacgtctccgcgcgcgacgtgaccgtgaccctgcccgactaccccgggagcgtccccatcccgctcaccgtgtactgcgccaagtcccagaacctgggctactacctgagcgggacgaccgccgacgccggcaactccatcttcaccaacaccgccagcttctcccccgcgcagggcgtgggggtccagctcacgcggaacggcaccatcatccccgccaacaacaccgtgagcctgggggccgtgggcacctccgccgtcagcctggggctcacggccaactacgcgcgcaccggcggccaggtgaccgccgggaacgtgcagtccatcatcggcgtcaccttcgtgtaccagcccggggacggcaacgccgacgtgacgatcaccgtcaacgggaaggtggtggccaagtga

SEQ ID NO: 563 - RNA, 1422 nt, synthetic construct
  misc_feature 1..1422: note Artificial____HsIgE(1-18)_Ec(J96)-FimH(22-300_N28S_N91S_N24 9Q)_Linker-PGDGN_Ec(J96)-FimG(24-37)_Linker-SGG_LumSynth(1- 154_C37A_N102D) CDS opt1
  source 1..1422: mol_type = other RNA
atggactggacctggatcctgttcctcgtggccgccgcgacccgcgtccacagcttcgcctgcaagacggcctccggcaccgccatccccatcgggggcgggagcgccaacgtgtacgtgaacctggcgccggtcgtgaacgtgggccagaacctggtcgtggacctctccacccagatcttctgccacaacgactaccccgagaccatcacggactacgtgaccctgcagcgggggagcgcctacggcggcgtcctgtccagcttctccgggaccgtgaagtacagcggctccagctaccccttccccaccacgtccgagaccccgcgcgtggtctacaacagccggaccgacaagccctggcccgtggccctctacctgacccccgtgtccagcgccgggggcgtcgcgatcaaggccgggtccctgatcgccgtgctcatcctgcgccagacgaacaactacaacagcgacgacttccagttcgtgtggaacatctacgccaacaacgacgtcgtggtgccgaccggcggctgcgacgtctccgcccgggacgtgaccgtgaccctgcccgactaccccgggagcgtccccatcccgctcacggtgtactgcgcgaagtcccagaacctgggctactacctgagcgggaccaccgccgacgccggcaacagcatcttcaccaacacggcctccttcagccccgcccagggcgtcggggtgcagctcacccgccagggcaccatcatccccgcgaacaacaccgtgtccctgggggccgtcggcacgagcgccgtgtccctggggctcaccgccaactacgcccggaccggcggccaggtgaccgcggggaacgtccagagcatcatcggcgtgacgttcgtgtaccagcccggggacggcaacgccgacgtcaccatcaccgtgaacgggaaggtggtcgccaagtccggcggcatgcagatctacgaggggaagctgaccgccgagggcctgcgcttcgggatcgtggccagccggttcaaccacgcgctcgtggaccgcctggtcgagggcgccatcgacgccatcgtgcggcacgggggccgcgaggaggacatcacgctggtgcgggtcccgggctcctgggagatccccgtggccgcgggggagctcgcccgcaaggaggacatcgacgccgtgatcgccatcggcgtcctgatccgcggggccacgccccacttcgactacatcgcgagcgaggtgtccaagggcctggccgacctcagcctggagctgcggaagcccatcaccttcggcgtgatcaccgccgacaccctcgagcaggccatcgagcgggccgggaccaagcacggcaacaaggggtgggaggcggccctgtccgccatcgagatggccaacctgttcaagagcctccgctga

SEQ ID NO: 564 - RNA, 1422 nt, synthetic construct
  misc_feature 1..1422: note Artificial____HsIgE(1-18)_Ec(J96)-FimH(22-300_N28S_N91S_N24 9Q_N256D)_Linker-PGDGN_Ec(J96)-FimG(24-37)_Linker-SGG_LumSy nth(1-154_C37A_N102D) CDS opt1
  source 1..1422: mol_type = other RNA
atggactggacctggatcctgttcctcgtggccgccgcgacccgcgtccacagcttcgcctgcaagacggcctccggcaccgccatccccatcgggggcgggagcgccaacgtgtacgtgaacctggcgccggtcgtgaacgtgggccagaacctggtcgtggacctctccacccagatcttctgccacaacgactaccccgagaccatcacggactacgtgaccctgcagcgggggagcgcctacggcggcgtcctgtccagcttctccgggaccgtgaagtacagcggctccagctaccccttccccaccacgtccgagaccccgcgcgtggtctacaacagccggaccgacaagccctggcccgtggccctctacctgacccccgtgtccagcgccgggggcgtcgcgatcaaggccgggtccctgatcgccgtgctcatcctgcgccagacgaacaactacaacagcgacgacttccagttcgtgtggaacatctacgccaacaacgacgtcgtggtgccgaccggcggctgcgacgtctccgcccgggacgtgaccgtgaccctgcccgactaccccgggagcgtccccatcccgctcacggtgtactgcgcgaagtcccagaacctgggctactacctgagcgggaccaccgccgacgccggcaacagcatcttcaccaacacggcctccttcagccccgcccagggcgtcggggtgcagctcacccgccagggcaccatcatccccgcggacaacaccgtgtccctgggggccgtcggcacgagcgccgtgtccctggggctcaccgccaactacgcccggaccggcggccaggtgaccgcggggaacgtccagagcatcatcggcgtgacgttcgtgtaccagcccggggacggcaacgccgacgtcaccatcaccgtgaacgggaaggtggtcgccaagtccggcggcatgcagatctacgaggggaagctgaccgccgagggcctgcgcttcgggatcgtggccagccggttcaaccacgcgctcgtggaccgcctggtcgagggcgccatcgacgccatcgtgcggcacgggggccgcgaggaggacatcacgctggtgcgggtcccgggctcctgggagatccccgtggccgcgggggagctcgcccgcaaggaggacatcgacgccgtgatcgccatcggcgtcctgatccgcggggccacgccccacttcgactacatcgcgagcgaggtgtccaagggcctggccgacctcagcctggagctgcggaagcccatcaccttcggcgtgatcaccgccgacaccctcgagcaggccatcgagcgggccgggaccaagcacggcaacaaggggtgggaggcggccctgtccgccatcgagatggccaacctgttcaagagcctccgctga

SEQ ID NO: 565 - RNA, 1422 nt, synthetic construct
  misc_feature 1..1422: note Artificial____HsIgE(1-18)_Ec(J96)-FimH(22-300_N28S_V48C_L55 C_N91S_N249Q)_Linker-PGDGN_Ec(J96)-FimG(24-37)_Linker-SGG_L umSynth(1-154_C37A_N102D) CDS opt1
  source 1..1422: mol_type = other RNA
atggactggacctggatcctgttcctcgtggccgccgcgacccgcgtccacagcttcgcctgcaagacggcctccggcaccgccatccccatcgggggcgggagcgccaacgtgtacgtgaacctggcgccgtgcgtcaacgtgggccagaactgcgtggtcgacctgtccacccagatcttctgccacaacgactaccccgagaccatcacggactacgtgaccctccagcgggggagcgcctacggcggcgtgctgtccagcttctccgggaccgtcaagtacagcggctccagctaccccttccccaccacgtccgagaccccgcgcgtggtgtacaacagccggaccgacaagccctggcccgtcgccctgtacctcacccccgtgtccagcgccgggggcgtggcgatcaaggccgggtccctgatcgccgtcctgatcctccgccagacgaacaactacaacagcgacgacttccagttcgtgtggaacatctacgccaacaacgacgtggtcgtgccgaccggcggctgcgacgtgtccgcccgggacgtcaccgtgaccctgcccgactaccccgggagcgtgcccatcccgctgacggtctactgcgcgaagtcccagaacctcggctactacctgagcgggaccaccgccgacgccggcaacagcatcttcaccaacacggcctccttcagccccgcccagggcgtgggggtccagctgacccgccagggcaccatcatccccgcgaacaacaccgtgtccctcggggccgtgggcacgagcgccgtctccctggggctgaccgccaactacgcccggaccggcggccaggtgaccgcggggaacgtgcagagcatcatcggcgtcacgttcgtgtaccagcccggggacggcaacgccgacgtgaccatcaccgtcaacgggaaggtggtggccaagtccggcggcatgcagatctacgaggggaagctcaccgccgagggcctgcgcttcgggatcgtcgccagccggttcaaccacgcgctggtggaccgcctcgtggagggcgccatcgacgccatcgtccggcacgggggccgcgaggaggacatcacgctggtgcgggtgccgggctcctgggagatccccgtcgccgcgggggagctggcccgcaaggaggacatcgacgccgtgatcgccatcggcgtgctcatccgcggggccacgccccacttcgactacatcgcgagcgaggtctccaagggcctggccgacctgagcctcgagctgcggaagcccatcaccttcggcgtgatcaccgccgacaccctggagcaggccatcgagcgggccgggaccaagcacggcaacaaggggtgggaggcggccctctccgccatcgagatggccaacctgttcaagagcctgcgctga

SEQ ID NO: 566 - RNA, 1422 nt, synthetic construct
  misc_feature 1..1422: note Artificial____HsIgE(1-18)_Ec(J96)-FimH(22-300_F165V)_Linker -PGDGN_Ec(J96)-FimG(24-37)_Linker-SGG_LumSynth(1-154_C37A_N 102D) CDS opt1
  source 1..1422: mol_type = other RNA
atggactggacctggatcctgttcctcgtggccgccgcgacccgcgtccacagcttcgcctgcaagacggccaacggcaccgccatccccatcgggggcgggtccgccaacgtgtacgtgaacctggcgccggtcgtgaacgtgggccagaacctggtcgtggacctcagcacccagatcttctgccacaacgactaccccgagaccatcacggactacgtgaccctgcagcgggggtccgcctacggcggcgtcctgagcaacttctccgggaccgtgaagtacagcggctccagctaccccttccccaccacgtccgagaccccgcgcgtggtctacaacagccggaccgacaagccctggcccgtggccctctacctgacccccgtgtccagcgccgggggcgtcgcgatcaaggccgggtccctgatcgccgtgctcatcctgcgccagacgaacaactacaacagcgacgacttccaggtggtctggaacatctacgccaacaacgacgtggtggtcccgaccggcggctgcgacgtgtccgcccgggacgtgaccgtcaccctgcccgactaccccgggagcgtgcccatcccgctcacggtctactgcgcgaagtcccagaacctgggctactacctgagcgggaccaccgccgacgccggcaactccatcttcaccaacacggccagcttcagccccgcccagggcgtgggggtgcagctcacccgcaacggcaccatcatccccgcgaacaacaccgtctccctgggggccgtgggcacgagcgccgtgtccctggggctcaccgccaactacgcccggaccggcggccaggtcaccgcggggaacgtgcagagcatcatcggcgtgacgttcgtctaccagcccggggacggcaacgccgacgtgaccatcaccgtgaacgggaaggtcgtggccaagtccggcggcatgcagatctacgaggggaagctgaccgccgagggcctgcgcttcgggatcgtggccagccggttcaaccacgcgctcgtcgaccgcctggtggagggcgccatcgacgccatcgtgcggcacgggggccgcgaggaggacatcacgctggtccgggtgccgggctcctgggagatccccgtggccgcgggggagctcgcccgcaaggaggacatcgacgccgtcatcgccatcggcgtgctgatccgcggggccacgccccacttcgactacatcgcgagcgaggtgtccaagggcctggccgacctcagcctggagctgcggaagcccatcaccttcggcgtcatcaccgccgacaccctcgagcaggccatcgagcgggccgggaccaagcacggcaacaaggggtgggaggcggccctgtccgccatcgagatggccaacctgttcaagagcctccgctga

SEQ ID NO: 567 - RNA, 1449 nt, synthetic construct
  misc_feature 1..1449: note Artificial____HsIgE(1-18)_Ec(J96)-FimH(22-300_N28S_N91S_N24 9Q)_Linker-PGDGN_Ec(J96)-FimG(24-37)_Linker-SGG_Ferritin(5- 167_N19Q) CDS opt1
  source 1..1449: mol_type = other RNA
atggactggacctggatcctgttcctcgtggccgccgcgacccgcgtccacagcttcgcctgcaagacggcctccggcaccgccatccccatcgggggcgggagcgccaacgtgtacgtgaacctggcgccggtcgtgaacgtgggccagaacctggtcgtggacctctccacccagatcttctgccacaacgactaccccgagaccatcacggactacgtgaccctgcagcgggggagcgcctacggcggcgtcctgtccagcttctccgggaccgtgaagtacagcggctccagctaccccttccccaccacgtccgagaccccgcgcgtggtctacaacagccggaccgacaagccctggcccgtggccctctacctgacccccgtgtccagcgccgggggcgtcgcgatcaaggccgggtccctgatcgccgtgctcatcctgcgccagacgaacaactacaacagcgacgacttccagttcgtgtggaacatctacgccaacaacgacgtcgtggtgccgaccggcggctgcgacgtctccgcccgggacgtgaccgtgaccctgcccgactaccccgggagcgtccccatcccgctcacggtgtactgcgcgaagtcccagaacctgggctactacctgagcgggaccaccgccgacgccggcaacagcatcttcaccaacacggcctccttcagccccgcccagggcgtcggggtgcagctcacccgccagggcaccatcatccccgcgaacaacaccgtgtccctgggggccgtcggcacgagcgccgtgtccctggggctcaccgccaactacgcccggaccggcggccaggtgaccgcggggaacgtccagagcatcatcggcgtgacgttcgtgtaccagcccggggacggcaacgccgacgtcaccatcaccgtgaacgggaaggtggtcgccaagtccggcggcgacatcatcaagctgctgaacgagcaggtcaacaaggagatgcagagctccaacctctacatgagcatgtccagctggtgctacacccactccctggacggggccggcctgttcctcttcgaccacgccgcggaggagtacgagcacgccaagaagctgatcatcttcctgaacgagaacaacgtgccggtgcagctcacgagcatctccgcccccgagcacaagttcgaggggctgacccagatcttccagaaggcctacgagcacgagcagcacatcagcgagtccatcaacaacatcgtggaccacgcgatcaagagcaaggaccacgccaccttcaacttcctgcagtggtacgtggccgagcagcacgaggaggaggtcctcttcaaggacatcctggacaagatcgagctgatcggcaacgagaaccacgggctctacctggccgaccagtacgtgaagggcatcgccaagtcccgcaagagctga

SEQ ID NO: 568 - RNA, 1449 nt, synthetic construct
  misc_feature 1..1449: note Artificial____HsIgE(1-18)_Ec(J96)-FimH(22-300_N28S_N91S_N24 9Q_N256D)_Linker-PGDGN_Ec(J96)-FimG(24-37)_Linker-SGG_Ferri tin(5-167_N19Q) CDS opt1
  source 1..1449: mol_type = other RNA
atggactggacctggatcctgttcctcgtggccgccgcgacccgcgtccacagcttcgcctgcaagacggcctccggcaccgccatccccatcgggggcgggagcgccaacgtgtacgtgaacctggcgccggtcgtgaacgtgggccagaacctggtcgtggacctctccacccagatcttctgccacaacgactaccccgagaccatcacggactacgtgaccctgcagcgggggagcgcctacggcggcgtcctgtccagcttctccgggaccgtgaagtacagcggctccagctaccccttccccaccacgtccgagaccccgcgcgtggtctacaacagccggaccgacaagccctggcccgtggccctctacctgacccccgtgtccagcgccgggggcgtcgcgatcaaggccgggtccctgatcgccgtgctcatcctgcgccagacgaacaactacaacagcgacgacttccagttcgtgtggaacatctacgccaacaacgacgtcgtggtgccgaccggcggctgcgacgtctccgcccgggacgtgaccgtgaccctgcccgactaccccgggagcgtccccatcccgctcacggtgtactgcgcgaagtcccagaacctgggctactacctgagcgggaccaccgccgacgccggcaacagcatcttcaccaacacggcctccttcagccccgcccagggcgtcggggtgcagctcacccgccagggcaccatcatccccgcggacaacaccgtgtccctgggggccgtcggcacgagcgccgtgtccctggggctcaccgccaactacgcccggaccggcggccaggtgaccgcggggaacgtccagagcatcatcggcgtgacgttcgtgtaccagcccggggacggcaacgccgacgtcaccatcaccgtgaacgggaaggtggtcgccaagtccggcggcgacatcatcaagctgctgaacgagcaggtcaacaaggagatgcagagctccaacctctacatgagcatgtccagctggtgctacacccactccctggacggggccggcctgttcctcttcgaccacgccgcggaggagtacgagcacgccaagaagctgatcatcttcctgaacgagaacaacgtgccggtgcagctcacgagcatctccgcccccgagcacaagttcgaggggctgacccagatcttccagaaggcctacgagcacgagcagcacatcagcgagtccatcaacaacatcgtggaccacgcgatcaagagcaaggaccacgccaccttcaacttcctgcagtggtacgtggccgagcagcacgaggaggaggtcctcttcaaggacatcctggacaagatcgagctgatcggcaacgagaaccacgggctctacctggccgaccagtacgtgaagggcatcgccaagtcccgcaagagctga

SEQ ID NO: 569 - RNA, 1449 nt, synthetic construct
  misc_feature 1..1449: note Artificial____HsIgE(1-18)_Ec(J96)-FimH(22-300_N28S_V48C_L55 C_N91S_N249Q)_Linker-PGDGN_Ec(J96)-FimG(24-37)_Linker-SGG_F erritin(5-167_N19Q) CDS opt1
  source 1..1449: mol_type = other RNA
atggactggacctggatcctgttcctcgtggccgccgcgacccgcgtccacagcttcgcctgcaagacggcctccggcaccgccatccccatcgggggcgggagcgccaacgtgtacgtgaacctggcgccgtgcgtcaacgtgggccagaactgcgtggtcgacctgtccacccagatcttctgccacaacgactaccccgagaccatcacggactacgtgaccctccagcgggggagcgcctacggcggcgtgctgtccagcttctccgggaccgtcaagtacagcggctccagctaccccttccccaccacgtccgagaccccgcgcgtggtgtacaacagccggaccgacaagccctggcccgtcgccctgtacctcacccccgtgtccagcgccgggggcgtggcgatcaaggccgggtccctgatcgccgtcctgatcctccgccagacgaacaactacaacagcgacgacttccagttcgtgtggaacatctacgccaacaacgacgtggtcgtgccgaccggcggctgcgacgtgtccgcccgggacgtcaccgtgaccctgcccgactaccccgggagcgtgcccatcccgctgacggtctactgcgcgaagtcccagaacctcggctactacctgagcgggaccaccgccgacgccggcaacagcatcttcaccaacacggcctccttcagccccgcccagggcgtgggggtccagctgacccgccagggcaccatcatccccgcgaacaacaccgtgtccctcggggccgtgggcacgagcgccgtctccctggggctgaccgccaactacgcccggaccggcggccaggtgaccgcggggaacgtgcagagcatcatcggcgtcacgttcgtgtaccagcccggggacggcaacgccgacgtgaccatcaccgtcaacgggaaggtggtggccaagtccggcggcgacatcatcaagctcctgaacgagcaggtcaacaaggagatgcagagctccaacctgtacatgagcatgtccagctggtgctacacccactccctcgacggggccggcctgttcctgttcgaccacgccgcggaggagtacgagcacgccaagaagctcatcatcttcctgaacgagaacaacgtgccggtgcagctgacgagcatctccgcccccgagcacaagttcgaggggctcacccagatcttccagaaggcctacgagcacgagcagcacatcagcgagtccatcaacaacatcgtcgaccacgcgatcaagagcaaggaccacgccaccttcaacttcctgcagtggtacgtggccgagcagcacgaggaggaggtgctgttcaaggacatcctcgacaagatcgagctgatcggcaacgagaaccacgggctgtacctcgccgaccagtacgtcaagggcatcgccaagtcccgcaagagctga

SEQ ID NO: 570 - RNA, 1449 nt, synthetic construct
  misc_feature 1..1449: note Artificial____HsIgE(1-18)_Ec(J96)-FimH(22-300_F165V)_Linker -PGDGN_Ec(J96)-FimG(24-37)_Linker-SGG_Ferritin(5-167_N19Q) CDS opt1
  source 1..1449: mol_type = other RNA
atggactggacctggatcctgttcctcgtggccgccgcgacccgcgtgcacagcttcgcctgcaagacggccaacggcaccgccatccccatcgggggcgggtccgccaacgtgtacgtgaacctggcgccggtcgtgaacgtgggccagaacctggtcgtggacctcagcacccagatcttctgccacaacgactaccccgagaccatcacggactacgtgaccctgcagcgggggtccgcctacggcggcgtcctgagcaacttctccgggaccgtgaagtacagcggctccagctaccccttccccaccacgtccgagaccccgcgcgtggtctacaacagccggaccgacaagccctggcccgtggccctctacctgacccccgtgtccagcgccgggggcgtcgcgatcaaggccgggtccctgatcgccgtgctcatcctgcgccagacgaacaactacaacagcgacgacttccaggtggtctggaacatctacgccaacaacgacgtggtggtcccgaccggcggctgcgacgtgtccgcccgggacgtgaccgtcaccctgcccgactaccccgggagcgtgcccatcccgctcacggtctactgcgcgaagtcccagaacctgggctactacctgagcgggaccaccgccgacgccggcaactccatcttcaccaacacggccagcttcagccccgcccagggcgtgggggtgcagctcacccgcaacggcaccatcatccccgcgaacaacaccgtctccctgggggccgtgggcacgagcgccgtgtccctggggctcaccgccaactacgcccggaccggcggccaggtcaccgcggggaacgtgcagagcatcatcggcgtgacgttcgtctaccagcccggggacggcaacgccgacgtgaccatcaccgtgaacgggaaggtcgtggccaagtccggcggcgacatcatcaagctgctgaacgagcaggtcaacaaggagatgcagagctccaacctctacatgagcatgtccagctggtgctacacccactccctggacggggccggcctgttcctcttcgaccacgccgcggaggagtacgagcacgccaagaagctgatcatcttcctgaacgagaacaacgtgccggtgcagctcacgagcatctccgcccccgagcacaagttcgaggggctgacccagatcttccagaaggcctacgagcacgagcagcacatcagcgagtccatcaacaacatcgtggaccacgcgatcaagagcaaggaccacgccaccttcaacttcctgcagtggtacgtcgccgagcagcacgaggaggaggtcctcttcaaggacatcctggacaagatcgagctgatcggcaacgagaaccacgggctctacctggccgaccagtacgtgaagggcatcgccaagtcccgcaagagctga

SEQ ID NO: 571 - RNA, 726 nt, synthetic construct; identical to SEQ ID NO: 321
  misc_feature 1..726: note Artificial____Ec(J96)-FimC(1-36)_Ec(J96)-FimC(37-241) CDS opt3
  source 1..726: mol_type = other RNA

SEQ ID NO: 572 - RNA, 672 nt, synthetic construct
  misc_feature 1..672: note = Artificial____HsIgE(1-18)_Ec(J96)-FimC(37-241) CDS opt3
  source 1..672: mol_type = other RNA
atggactggacctggatcctgttcctcgtggccgctgcaacaagagtccacagcggcgttgcccttggggcgactagggtgatttaccccgctggacagaagcaagtacagctggccgtgacgaacaatgatgagaactccacctatttgatacagtcttgggtcgaaaatgcagacggtgtgaaagatggccggtttatcgttacacctccattattcgccatgaaggggaaaaaggagaacactctgcgcattctagacgctaccaataaccagctcccgcaagatcgagaatcactgttttggatgaatgtgaaagcaatccccagtatggacaagagcaaacttacagagaacaccctgcagttggccattatctcccgtataaagctctactatagacctgctaagctggccctgccacccgatcaggcggcagaaaaactcaggttccggcgctctgccaattcgttaactctgatcaaccctacaccatactatcttaccgtcacggagttgaatgctggaactagagtgctggagaacgccctagtaccccctatgggcgaatcaaccgttaagctcccaagcgacgcaggtagtaatattacatacaggactatcaacgattatggggctctgaccccgaaaatgacaggagtgatggagtga

SEQ ID NO: 573 - RNA, 903 nt, synthetic construct; identical to SEQ ID NO: 217
  misc_feature 1..903: note Artificial____Ec(J96)-FimH(1-21)_Ec(J96)-FimH(22-300) CDS opt3
  source 1..903: mol_type = other RNA

SEQ ID NO: 574 - RNA, 894 nt, synthetic construct
  misc_feature 1..894: note = Artificial____HsIgE(1-18)_Ec(J96)-FimH(22-300) CDS opt3
  source 1..894: mol_type = other RNA
atggactggacctggatcctgttcctcgtggccgctgcaacaagagtccacagctttgcctgcaagactgcgaacggcacggctattcccatagggggaggttccgccaatgtttacgtgaaccttgcacctgtagtgaatgtcggccagaacctggtggttgatttgtctacccaaatcttctgtcataatgactatccagagacaattactgattacgtgaccttacagagggggtcagcctatggaggcgtcctgagtaactttagcggtacagtgaaatactccgggtcttcgtatccgttccccaccacttcagaaacacctcgggtagtttacaatagccgcaccgacaagccatggcccgtggctctatatctcacgcctgtcagttccgcaggaggcgtggccatcaaagctggctctctgattgccgtgcttatcctgcgacagactaacaattacaacagcgatgactttcagttcgtctggaatatatacgcgaacaatgatgttgtggtaccaaccgggggatgcgacgtgtccgcacgtgatgtcacagtgactttgcccgactatcctggttcagttccaatcccgctcaccgtgtactgtgccaagagtcaaaacctgggctattacctgagcgggacaaccgctgatgccggaaattctatttttacgaacactgcatccttctcacccgctcagggcgtcggtgtgcagctcacaagaaacgggaccatcattcctgccaataacactgttagcttaggagcggtaggcacaagtgccgtgtctctgggccttaccgcaaattatgctaggaccgggggacaggtcacggccggtaacgtgcaatccatcataggcgtcacatttgtgtaccagtga

SEQ ID NO: 575 - RNA, 900 nt, synthetic construct
  misc_feature 1..900: note = Artificial____MmIgK(1-20)_Ec(J96)-FimH(22-300) CDS opt3
  source 1..900: mol_type = other RNA
atggagaccgacacactgctcctttgggtgctgttgttatgggtccccggcagcactgggttcgcctgcaagacggctaacggaaccgcaatccctattggtggcgggtccgccaatgtttacgtgaacctggcgccagtagtgaatgtcggacagaacctagtggttgatctctctacacaaatattttgtcacaatgactatccggaaactatcaccgattacgtgacactgcagagaggctcagcttatggtggggtccttagtaacttcagcggaaccgtgaaatactccggctcatcgtatccctttcctactacatcagagaccccaagggtagtttacaatagccggacggacaagccctggcctgtggccctgtatttgactccagtcagttccgcaggcggggtggccattaaagctggatctctcatcgcagtgctgattctgcgccagaccaacaattacaacagcgatgacttccagtttgtctggaatatctacgccaacaatgatgttgtggtacccacaggtggctgcgacgtgtccgctcgagatgtcactgtgaccctccctgactatccagggtcagttccgatacccttaacagtgtactgtgccaagagtcaaaacctgggatattaccttagcggcaccacggcggatgcaggtaattctatcttcactaacacagcctccttttctcctgctcagggggtcggagtgcagttgacccgtaacggcactattatcccagccaataacacagtaagcctgggcgcagttgggaccagtgctgtgtctctaggactcacggccaattatgcgagaaccggtggccaggtcacagccgggaacgtgcaatccattatcggagtcactttcgtgtaccagtga

SEQ ID NO: 576 - RNA, 960 nt, synthetic construct
  misc_feature 1..960: note Artificial____Ec(J96)-FimH(1-21)_Ec(J96)-FimH(22-300)_Linke r-PGDGN_Ec(J96)-FimG(24-37) CDS opt3
  source 1..960: mol_type = other RNA
atgaagagagtgatcaccctgttcgccgtcctccttatgggctggagcgttaacgcttggtcctttgcatgcaaaacagccaatgggactgcgattcccataggaggtggctctgctaacgtgtacgtaaatctggcccctgtggtcaacgtggggcagaatttggttgtggacttatcaacgcaaatcttctgtcacaacgattatccagagaccattacagactacgtcactctgcagaggggaagtgcatatggcggtgtgctaagcaatttttccgggaccgtaaagtactctggatcgtcatatccgttccccacaaccagcgaaactcctcgggttgtgtacaacagtcgcacagataaaccatggcccgtcgccctctatctgacccctgtgtcctctgctggcggcgtggcaatcaaggccgggagccttattgctgtcctgatcttgcgacagacgaataactacaattccgacgattttcagttcgtttggaacatatacgccaataacgacgtggtagtgccaactggaggttgcgatgtctcagcgcgtgacgtgaccgttacactccccgattatcctggcagtgtgccaatcccgctgactgtctactgtgcaaaaagccaaaatctggggtattacctctctggaaccacagccgacgctggcaactccatttttaccaacacggcctcattcagccccgcacagggtgtgggggtacagttaactagaaatggaacaatcattcctgctaacaataccgttagtctgggcgccgtgggcacttctgcggtctcccttgggttgacagccaactatgcaaggaccggaggtcaggtgacggctggcaatgtccaaagcatcataggggtgacctttgtttaccagccaggagatggcaacgccgacgtgacaattactgtaaatggtaaggtcgtggctaagtga

SEQ ID NO: 577 - RNA, 951 nt, synthetic construct
  misc_feature 1..951: note Artificial____HsIgE(1-18)_Ec(J96)-FimH(22-300)_Linker-PGDGN _Ec(J96)-FimG(24-37) CDS opt3
  source 1..951: mol_type = other RNA
atggactggacctggatcctgttcctcgtggccgctgcaacaagagtccacagctttgcctgcaagactgcgaacggcacggctattcccatagggggaggttccgccaatgtttacgtgaaccttgcacctgtagtgaatgtcggccagaacctggtggttgatttgtctacccaaatcttctgtcataatgactatccagagacaattactgattacgtgaccttacagagggggtcagcctatggaggcgtcctgagtaactttagcggtacagtgaaatactccgggtcttcgtatccgttccccaccacttcagaaacacctcgggtagtttacaatagccgcaccgacaagccatggcccgtggctctatatctcacgcctgtcagttccgcaggaggcgtggccatcaaagctggctctctgattgccgtgcttatcctgcgacagactaacaattacaacagcgatgactttcagttcgtctggaatatatacgcgaacaatgatgttgtggtaccaaccgggggatgcgacgtgtccgcacgtgatgtcacagtgactttgcccgactatcctggttcagttccaatcccgctcaccgtgtactgtgccaagagtcaaaacctgggctattacctgagcgggacaaccgctgatgccggaaattctatttttacgaacactgcatccttctcacccgctcagggcgtcggtgtgcagctcacaagaaacgggaccatcattcctgccaataacactgttagcttaggagcggtaggcacaagtgccgtgtctctgggccttaccgcaaattatgctaggaccgggggacaggtcacggccggtaacgtgcaatccatcataggcgtcacatttgtgtaccagccaggggacggaaatgctgatgttactattaccgtgaacggcaaagtagtcgccaagtga

SEQ ID NO: 578 - RNA, 957 nt, synthetic construct
  misc_feature 1..957: note Artificial____HsIgE(1-18)_Ec(J96)-FimH(22-300)_Linker-G4SGG _Ec(J96)-FimG(24-37) CDS opt3
  source 1..957: mol_type = other RNA
atggactggacctggatcctgttcctcgtggccgctgcaacaagagtccacagctttgcctgcaagactgcgaacggcacggctattcccatagggggaggttccgccaatgtttacgtgaaccttgcacctgtagtgaatgtcggccagaacctggtggttgatttgtctacccagatcttctgtcataatgactatccagagacaattactgattacgtgaccttacagagggggtcagcctatggaggcgtcctgagtaactttagcggtacagtgaaatactccgggtcttcgtatccgttccccaccacttcagaaacacctcgggtagtttacaatagccgcaccgacaagccatggcccgtggctctatatctcacgcctgtcagttccgcaggaggcgtggccatcaaagctggctctctgattgccgtgcttatcctgcgacagactaacaattacaacagcgatgactttcagttcgtctggaatatatacgcgaacaatgatgttgtggtaccaaccgggggatgcgacgtgtccgcacgtgatgtcacagtgactttgcccgactatcctggttcagttccaatcccgctcaccgtgtactgtgccaagagtcaaaacctgggctattacctgagcgggacaaccgctgatgccggaaattctatttttacgaacactgcatccttctcacccgctcagggcgtcggtgtgcagctcacaagaaacgggaccatcattcctgccaataacactgttagcttaggagcggtaggcacaagtgccgtgtctctgggccttaccgcaaattatgctaggaccgggggacaggtcacggccggtaacgtgcaatccatcataggcgtcacatttgtgtaccaagggggaggcggtagcgggggcgctgacgttactattaccgtgaatggaaaagtagtcgccaagtga

SEQ ID NO: 579 - RNA, 957 nt, synthetic construct
  misc_feature 1..957: note Artificial____MmIgK(1-20)_Ec(J96)-FimH(22-300)_Linker-PGDGN _Ec(J96)-FimG(24-37) CDS opt3
  source 1..957: mol_type = other RNA
atggagaccgacacactgctcctttgggtgctgttgttatgggtccccggcagcactgggttcgcctgcaagacggctaacggaaccgcaatccctattggtggcgggtccgccaatgtttacgtgaacctggcgccagtagtgaatgtcggacagaacctagtggttgatctctctacacaaatattttgtcacaatgactatccggaaactatcaccgattacgtgacactgcagagaggctcagcttatggtggggtccttagtaacttcagcggaaccgtgaaatactccggctcatcgtatccctttcctactacatcagagaccccaagggtagtttacaatagccggacggacaagccctggcctgtggccctgtatttgactccagtcagttccgcaggcggggtggccattaaagctggatctctcatcgcagtgctgattctgcgccagaccaacaattacaacagcgatgacttccagtttgtctggaatatctacgccaacaatgatgttgtggtacccacaggtggctgcgacgtgtccgctcgagatgtcactgtgaccctccctgactatccagggtcagttccgatacccttaacagtgtactgtgccaagagtcaaaacctgggatattaccttagcggcaccacggcggatgcaggtaattctatcttcactaacacagcctccttttctcctgctcagggggtcggagtgcagttgacccgtaacggcactattatcccagccaataacacagtaagcctgggcgcagttgggaccagtgctgtgtctctaggactcacggccaattatgcgagaaccggtggccaggtcacagccgggaacgtgcaatccattatcggagtcactttcgtgtaccagcccggcgacggtaatgcagatgttaccataacagtgaacgggaaagtagtcgctaagtga

SEQ ID NO: 580 - RNA, 957 nt, synthetic construct
  misc_feature 1..957: note Artificial____MmIgK(1-20)_Ec(536)-FimH(22-300)_Linker-PGDGN _Ec(J96)-FimG(24-37) CDS opt3
  source 1..957: mol_type = other RNA
atggagaccgacacactgctcctttgggtgctgttgttatgggtccccggcagcactgggttcgcctgcaagacggctaacggaaccgcaatccctattggtggcgggtccgccaatgtttacgtgaacctggcgccagctgtaaatgtgggacagaacctagtcgtggatctctctacacaaatattttgtcacaatgactatccggaaactatcaccgattacgttacactgcagagaggctcagcctatggtggggtgcttagtagcttctccggaaccgtcaaatacaacggctcatcgtatccctttcctactacatcagagaccccaagggtggtatacaatagccggacggacaagccctggcctgttgcactgtatttgactccagtgagttccgccggcggggtcgctattaaagcaggatctctcatcgccgtgctgattctgcgccagaccaacaattacaacagcgatgacttccagtttgtgtggaatatctacgctaacaatgatgtcgttgtgcccacaggtggctgcgacgtatccgcccgagatgtgactgtcaccctccctgactatccagggtcagtgccgatacccttaacagtttactgtgcgaagagtcaaaacctgggatattaccttagcggcaccacggcagatgccggtaattctatcttcactaacacagcttccttttctcctgcccagggggtgggagtccagttgacccgtaacggcactattatcccagcaaataacacagtgagcctgggcgctgtagggaccagtgccgtttctctaggactcacggcgaattatgccagaaccggtggccaggtgacagcagggaacgtccaatccattatcggagtgactttcgtctaccagcccggcgacggtaatgctgatgtgaccataacagttaacgggaaagtggtagccaagtga

SEQ ID NO: 581 - RNA, 981 nt, synthetic construct
  misc_feature 1..981: note Artificial____HsIgE(1-18)_Ec(J96)-FimH(22-300)_Linker-(G4S) 3_Ec(J96)-FimC(135-148) CDS opt3
  source 1..981: mol_type = other RNA
atggactggacctggatcctgttcctcgtggccgctgcaacaagagtccacagctttgcctgcaagactgcgaacggcacggctattcccatagggggaggttccgccaatgtttacgtgaaccttgcacctgtagtgaatgtcggccagaacctggtggttgatttgtctacccagatcttctgtcataatgactatccagagacaattactgattacgtgaccttacagagggggtcagcctatggaggcgtcctgagtaactttagcggtacagtgaaatactccgggtcttcgtatccgttccccaccacttcagaaacacctcgggtagtttacaatagccgcaccgacaagccatggcccgtggctctatatctcacgcctgtcagttccgcaggaggcgtggccatcaaagctggctctctgattgccgtgcttatcctgcgacagactaacaattacaacagcgatgactttcagttcgtctggaatatatacgcgaacaatgatgttgtggtaccaaccgggggatgcgacgtgtccgcacgtgatgtcacagtgactttgcccgactatcctggttcagttccaatcccgctcaccgtgtactgtgccaagagtcaaaacctgggctattacctgagcgggacaaccgctgatgccggaaattctatttttacgaacactgcatccttctcacccgctcagggcgtcggtgtgcagctcacaagaaacgggaccatcattcctgccaataacactgtatcgttaggagcggttggcacaagtgccgtgtctctgggccttaccgcaaattatgctaggaccgggggacaggtcacggccggtaacgtgcaatccatcataggcgtcacatttgtgtaccaagggggaggcggtagcgggggcggaggcagcgggggaggtggctctactgagaataccttgcagctggctattatctcccggattaaatga

SEQ ID NO: 582 - RNA, 1404 nt, synthetic construct
  misc_feature 1..1404: note Artificial____LumSynth(1-154_C37A_N102D)_Linker(GGS)4-GGG_E c(J96)-FimH(22-300)_Linker-PGDGN_Ec(J96)-FimG(24-37) CDS opt3
  source 1..1404: mol_type = other RNA
atgcagatctacgagggcaagctgaccgccgaagggctcagattcggaattgtggctagcaggtttaaccacgcacttgtcgaccggctggttgagggtgccatagatgcgatcgtgcgccatggcgggcgagaagaggacattacattggtacgtgtgcccggatcctgggaaatccctgtcgctgccggcgagttagcaagaaaagaggatattgacgccgtgatcgctataggtgttctgatcaggggagcaactccacacttcgattatattgcctctgaagtgtcaaaggggctagctgacctcagtctggagcttcggaaaccgatcacgtttggcgtcattaccgccgatacactggaacaagcgatcgagcgcgcaggcactaagcatgggaataaaggatgggaggccgctttgagcgccatagaaatggcaaacctcttcaagtccctgagaggtggctctgggggatcgggcggttcagggggaagcggcggcgggtttgcttgcaagaccgccaatggaacagcgattcccatcggtggcgggagtgccaacgtgtacgtaaatctggcacctgttgtgaacgtcggacagaatctcgtggtggacttatccacccagattttctgtcacaacgattatccagagactatcacagactacgtcaccctgcagaggggctctgcttatggtggggttcttagcaatttttccggcacggtgaaatactcaggaagtagctatcccttccctactacctctgaaacaccacgggtagtgtacaactcccgcactgataagccctggcctgtcgccttgtacctgaccccagtgtcaagcgctggcggggttgccatcaaagcaggaagtctaattgccgtgctcatactgcgacaaacaaataactataattctgacgattttcagttcgtctggaacatctacgctaataacgacgtggtagttccgaccggtggctgcgacgtgtccgcgagagatgtcacggtgactcttcccgactatcctgggagcgtcccaattcccctgacagtgtactgtgcaaagtcgcagaacttgggatattacctctctggcaccactgccgatgctggtaattccatctttacaaacaccgcctcattcagtcctgcacagggggttggcgtgcaactgacgaggaatggaaccataattccagccaacaatacagtcagcttaggcgctgtagggacttccgccgtgtctctgggactcaccgcaaactatgcgcggacaggtggccaggttactgctgggaatgtgcagagcatcatcggagtcacctttgtgtaccagcccggcgacggtaacgccgatgtaacaattaccgtgaatgggaaagttgtcgcaaagtga

SEQ ID NO: 583 - RNA, 1422 nt, synthetic construct
  misc_feature 1..1422: note Artificial____HsIgE(1-18)_Ec(J96)-FimH(22-300)_Linker-PGDGN _Ec(J96)-FimG(24-37)_Linker-SGG_LumSynth(1-154_C37A_N102D) CDS opt3
  source 1..1422: mol_type = other RNA
atggactggacctggatcctgttcctcgtggccgctgcaacaagagtccacagctttgcctgcaagactgcgaacggcacggctattcccatagggggaggttccgccaatgtttacgtgaaccttgcacctgtagtgaatgtcggccagaacctggtggttgatttgtctacccaaatcttctgtcataatgactatccagagacaattactgattacgtgaccttacagagggggtcagcctatggaggcgtcctgagtaactttagcggtacagtgaaatactccgggtcttcgtatccgttccccaccacttcagaaacacctcgggtagtttacaatagccgcaccgacaagccatggcccgtggctctatatctcacgcctgtcagttccgcaggaggcgtggccatcaaagctggctctctgattgccgtgcttatcctgcgacagactaacaattacaacagcgatgactttcagttcgtctggaatatatacgcgaacaatgatgttgtggtaccaaccgggggatgcgacgtgtccgcacgtgatgtcacagtgactttgcccgactatcctggttcagttccaatcccgctcaccgtgtactgtgccaagagtcaaaacctgggctattacctgagcgggacaaccgctgatgccggaaattctatttttacgaacactgcatccttctcacccgctcagggcgtcggtgtgcagctcacaagaaacgggaccatcattcctgccaataacactgttagcttaggagcggtaggcacaagtgccgtgtctctgggccttaccgcaaattatgctaggaccgggggacaggtcacggccggtaacgtgcaatccatcataggcgtcacatttgtgtaccagccaggggacggaaatgctgatgttactattaccgtgaacggcaaagtagtcgccaagagcggtgggatgcagatctatgagggcaagttgacagcagaaggactgcggttcggcattgtggcctcgcgctttaatcacgctctagttgacagactcgtggagggggcgatcgacgcaatcgtcaggcatggaggtcgggaagaggatattactctggtgcgcgtacccggctcttgggagatacctgtggccgctggggaacttgcccgaaaagaggacatcgatgcagttattgccatcggagtcctgataagaggcgctaccccacacttcgactacattgcctccgaagtgtcaaagggtttggcagatctcagtctggagttaaggaaacccatcacatttggggtgatcaccgcggacactctggagcaggctattgaacgggccggcacgaagcatggaaacaaaggctgggaggcagccctcagcgctatcgaaatggccaatcttttcaagtccctgcgttga

SEQ ID NO: 584 - RNA, 1449 nt, synthetic construct
  misc_feature 1..1449: note Artificial____HsIgE(1-18)_Ec(J96)-FimH(22-300)_Linker-PGDGN _Ec(J96)-FimG(24-37)_Linker-SGG_Ferritin(5-167_N19Q) CDS opt3
  source 1..1449: mol_type = other RNA
atggactggacctggatcctgttcctcgtggccgctgcaacaagagtccacagctttgcctgcaagactgcgaacggcacggctattcccatagggggaggttccgccaatgtttacgtgaaccttgcacctgtagtgaatgtcggccagaacctggtggttgatttgtctacccaaatcttctgtcataatgactatccagagacaattactgattacgtgaccttacagagggggtcagcctatggaggcgtcctgagtaactttagcggtacagtgaaatactccgggtcttcgtatccgttccccaccacttcagaaacacctcgggtagtttacaatagccgcaccgacaagccatggcccgtggctctatatctcacgcctgtcagttccgcaggaggcgtggccatcaaagctggctctctgattgccgtgcttatcctgcgacagactaacaattacaacagcgatgactttcagttcgtctggaatatatacgcgaacaatgatgttgtggtaccaaccgggggatgcgacgtgtccgcacgtgatgtcacagtgactttgcccgactatcctggttcagttccaatcccgctcaccgtgtactgtgccaagagtcaaaacctgggctattacctgagcgggacaaccgctgatgccggaaattctatttttacgaacactgcatccttctcacccgctcagggcgtcggtgtgcagctcacaagaaacgggaccatcattcctgccaataacactgtgagcttaggagcggttggcacaagtgccgtgtctctgggccttaccgcaaattatgctaggaccgggggacaggtcacggccggtaacgtgcaatccatcataggcgtcacatttgtgtaccagccaggggacggaaatgctgatgttactattaccgtgaacggcaaagtagtcgccaagagcggtggggacatcattaagttgctgaatgagcaggtaaacaaagaaatgcagtcgtctaatctatatatgtccatgtcaagttggtgctacacacacagcctcgacggcgcaggactgttcctttttgatcatgccgctgaggaatacgagcacgcgaagaaactgatcatcttcttgaacgagaataacgttcccgtgcaactcacttccatttctgcacctgaacataagtttgagggcctgacccagatattccagaaagcctatgaacacgagcaacacatcagcgagtcaattaataacatcgtcgaccatgctataaagagtaaggatcacgccacattcaactttttacagtggtacgtggcagaacagcatgaggaagaggtactgttcaaagacattctcgataagatcgaacttatcgggaatgagaaccacggactgtatttggccgaccagtacgtgaaaggtattgctaagtcccggaaaagctga

SEQ ID NO: 585 - RNA, 1479 nt, synthetic construct
  misc_feature 1..1479: note Artificial____MmIgK(1-20)_Ec(J96)-FimH(22-300)_Linker-PGDGN _Ec(J96)-FimG(24-37)_Linker-(GGS)4_Ferritin(5-166) CDS opt3
  source 1..1479: mol_type = other RNA
atggagaccgacacactgctcctttgggtgctgttgttatgggtccccggcagcactgggttcgcctgcaagacggctaacggaaccgcaatccctattggtggcgggtccgccaatgtttacgtgaacctggcgccagtagtgaatgtcggacagaacctagtggttgatctctctacacaaatattttgtcacaatgactatccggaaactatcaccgattacgtgacactgcagagaggctcagcttatggtggggtccttagtaacttcagcggaaccgtgaaatactccggctcatcgtatccctttcctactacatcagagaccccaagggtagtttacaatagccggacggacaagccctggcctgtggccctgtatttgactccagtcagttccgcaggcggggtggccattaaagctggatctctcatcgcagtgctgattctgcgccagaccaacaattacaacagcgatgacttccagtttgtctggaatatctacgccaacaatgatgttgtggtacccacaggtggctgcgacgtgtccgctcgagatgtcactgtgaccctccctgactatccagggtcagttccgatacccttaacagtgtactgtgccaagagtcaaaacctgggatattaccttagcggcaccacggcggatgcaggtaattctatcttcactaacacagcctccttttctcctgctcagggggtcggagtgcagttgacccgtaacggcactattatcccagccaataacacagtaagcctgggcgcagttgggaccagtgctgtgtctctaggactcacggccaattatgcgagaaccggtggccaggtcacagccgggaacgtgcaatccattatcggagtcactttcgtgtaccagcccggcgacggtaatgcagatgttaccataacagtgaacgggaaagtagtcgctaagggcggaagcggcgggtcgggaggttctggcgggtccgacattatcaagctgcttaatgaacaggtgaacaaagagatgaactcaagtaatctgtatatgagcatgtcctcttggtgctacactcatagcttggacggagccggcctctttctgttcgatcacgctgccgaagagtacgagcatgcaaagaaattaattatctttctgaatgaaaacaatgttcctgtgcagctcacctcaatcagtgccccagagcacaagttcgaaggtcttacacaaatttttcagaaggcttatgagcatgagcagcacatatccgaaagcatcaacaatattgtcgaccacgcgatcaaatctaaggatcatgcaaccttcaacttcctgcaatggtacgtggccgagcagcacgaagaggaagtattgtttaaagacatactagataagattgagctgatcgggaacgagaatcatggcctctatctggctgaccagtacgtgaaaggaatcgccaagtcaaggaaatga

SEQ ID NO: 586 - RNA, 1122 nt, synthetic construct
  misc_feature 1..1122: note Artificial____HsIgE(1-18)_Ec(J96)-FimH(22-300)_Linker-PGDGN _Ec(J96)-FimG(24-37)_TMdomain-HA(510-566) CDS opt3
  source 1..1122: mol_type = other RNA
atggactggacctggatcctgttcctcgtggccgctgcaacaagagtccacagctttgcctgcaagactgcgaacggcacggctattcccatagggggaggttccgccaatgtttacgtgaaccttgcacctgtagtgaatgtcggccagaacctggtggttgatttgtctacccaaatcttctgtcataatgactatccagagacaattactgattacgtgaccttacagagggggtcagcctatggaggcgtcctgagtaactttagcggtacagtgaaatactccgggtcttcgtatccgttccccaccacttcagaaacacctcgggtagtttacaatagccgcaccgacaagccatggcccgtggctctatatctcacgcctgtcagttccgcaggaggcgtggccatcaaagctggctctctgattgccgtgcttatcctgcgacagactaacaattacaacagcgatgactttcagttcgtctggaatatatacgcgaacaatgatgttgtggtaccaaccgggggatgcgacgtgtccgcacgtgatgtcacagtgactttgcccgactatcctggttcagttccaatcccgctcaccgtgtactgtgccaagagtcaaaacctgggctattacctgagcgggacaaccgctgatgccggaaattctatttttacgaacactgcatccttctcacccgctcagggcgtcggtgtgcagctcacaagaaacgggaccatcattcctgccaataacactgttagcttaggagcggtaggcacaagtgccgtgtctctgggccttaccgcaaattatgctaggaccgggggacaggtcacggccggtaacgtgcaatccatcataggcgtcacatttgtgtaccagccaggggacggaaatgctgatgttactattaccgtgaacggcaaagtagtcgccaaggcaaagttgaatcgggaggaaatcgacggtgtgaaactggagagcacacgcatttatcagatcctagccatctactcgactgttgcttcttccctcgtgctggtcgtgtcacttggggcgattagtttctggatgtgcagcaacggctccctgcagtgtagaatatgcatctga

SEQ ID NO: 587 - RNA, 1455 nt, synthetic construct
  misc_feature 1..1455: note Artificial____HsIgE(1-18)_LumSynth(1-154_C37A_N102D)_Linker (GGS)4-GGG_Ec(J96)-FimH(22-300)_Linker-PGDGN_Ec(J96)-FimG(2 4-37) CDS opt3
  source 1..1455: mol_type = other RNA
atggactggacctggatcctgttcctcgtggccgctgcaacaagagtccacagccagatttacgagggcaaacttactgccgaagggctgaggtttggaatagttgcgtcccggttcaaccatgctttggtggatcgcttagtagagggtgccatcgacgcaattgtgcgacacggcgggcgtgaagaggatatcacgctggtcagagtgcccggatcttgggaaattcctgttgccgctggcgagctagcaaggaaggaggacatcgatgccgtgatagctatcggtgtcctcattcgcggggccaccccacattttgactatatcgcgtcagaagtgagtaagggactggcagatcttagcctggagttgcggaaaccgattacattcggcgtaatcactgccgacaccctcgaacaagctatagagagagccggcacaaagcacgggaataaaggatgggaggcagctctgtccgccattgaaatggcgaacctgtttaagtctctcaggggtggctcagggggatcgggcggtagcgggggaagtggcggcgggttcgcctgcaagaccgcaaatggaactgctatccccattggtggcgggtccgccaacgtttacgtgaatttagctcctgtcgtgaacgtgggacagaatctggtcgttgatctttctacacagatcttttgtcataacgactatccagagaccatcacggattacgtgactttgcagcggggcagcgcctatggtggggtactgtccaatttctcaggcaccgtgaaatacagtggaagctcttatccctttcctacaacttccgaaaccccacgcgtcgtgtacaactcacgaacagacaagccctggcctgttgcactatacctcaccccagtgagcagtgccggcggggtcgctattaaagcgggatctctgatagcagtgcttatcctgagacaaacgaataactataattccgatgacttccagtttgtatggaacatttacgccaataacgacgttgtggtcccgactggtggctgcgatgtgagcgctagggacgtcacagtgaccttgcccgattatcctgggtcggttccaatccccctcactgtgtactgtgccaagtctcagaacctgggatattacttatccggcacaaccgcagacgccggtaattcaatattcacgaacaccgctagttttagccctgcccagggggtaggcgtccaactgacacggaatggaactattatcccagcaaacaataccgtgtccctcggcgcggttgggacatctgctgtgagccttggactgactgccaactatgcacgtaccggtggccaggtcacagccgggaatgtgcagtcaatcattggagtaaccttcgtgtaccagcccggcgatggtaacgctgacgttactatcacggtcaatgggaaagtggtggccaagtga

SEQ ID NO: 588 - RNA, 1422 nt, synthetic construct
  misc_feature 1..1422: note Artificial____HsIgE(1-18)_Ec(J96)-FimH(22-300_N28S_N91S_N24 9Q)_Linker-PGDGN_Ec(J96)-FimG(24-37)_Linker-SGG_LumSynth(1- 154_C37A_N102D) CDS opt3
  source 1..1422: mol_type = other RNA
atggactggacctggatcctgttcctcgtggccgctgcaacaagagtccacagctttgcctgcaagactgcgtccggcacggctattcccatagggggaggttctgccaacgtttacgtgaatcttgcacctgtagtgaacgtcggccagaatctggtggttgatttgtcaacccaaatcttctgtcataacgactatccagagacaattactgattacgtgaccttacagagggggagtgcctatggaggcgtcctgagctccttttctggtacagtgaaatactcggggtcaagctatccgttccccaccacgagtgaaacacctcgggtagtttacaattcccgcaccgacaagccatggcccgtggctctatatctcacgcctgtctctagcgcaggaggcgtggccatcaaagctggctccctgattgccgtgcttatcctgcgacagactaacaattacaactcagatgactttcagttcgtctggaatatatacgcgaacaatgatgttgtggtaccaaccgggggatgcgacgtgagtgcacgtgatgtcacagtgactttgcccgactatcctggtagcgttccaatcccgctcaccgtgtactgtgccaagtctcaaaacctgggctattacctgtccgggacaaccgctgatgccggaaattcaatttttacgaacactgctagcttcagtcccgcacagggcgtcggtgtgcagctcacaagacaggggaccatcattcctgccaataacactgtatctttaggagcggttggcacatccgccgtgagcctgggccttaccgcaaactatgctaggactgggggacaagtcaccgccggtaatgtgcagtcgatcataggcgtcacatttgtgtaccagccaggggacggaaacgctgatgttactattaccgtgaatggcaaagtagtcgccaagtctggtgggatgcagatctatgagggcaagttgacagcagaaggactgcggttcggcattgtggcctcccgctttaaccacgctctagttgacagactcgtggagggggcgatcgacgcaatcgtcaggcatggaggtcgggaagaggatattactctggtgcgcgtacccggctcatgggagatacctgtggccgctggggaacttgcccgaaaagaggacatcgatgcagttattgccatcggagtcctgataagaggcgctaccccacacttcgactacattgccagtgaagtgagcaagggtttggcagatctctccctggagttaaggaaacccatcacatttggggtgatcaccgcggacactctggagcaagctattgaacgggccggcacgaagcatggaaataaaggctgggaggcagccctctctgctatcgaaatggccaaccttttcaagagcctgcgttga

SEQ ID NO: 589 - RNA, 1422 nt, synthetic construct
  misc_feature 1..1422: note Artificial____HsIgE(1-18)_Ec(J96)-FimH(22-300_N28S_N91S_N24 9Q_N256D)_Linker-PGDGN_Ec(J96)-FimG(24-37)_Linker-SGG_LumSy nth(1-154_C37A_N102D) CDS opt3
  source 1..1422: mol_type = other RNA
atggactggacctggatcctgttcctcgtggccgctgcaacaagagtccacagctttgcctgcaagactgcgtccggcacggctattcccatagggggaggttctgccaacgtttacgtgaatcttgcacctgtagtgaacgtcggccagaatctggtggttgatttgtcaacccaaatcttctgtcataacgactatccagagacaattactgattacgtgaccttacagagggggagtgcctatggaggcgtcctgagctccttttctggtacagtgaaatactcggggtcaagctatccgttccccaccacgagtgaaacacctcgggtagtttacaattcccgcaccgacaagccatggcccgtggctctatatctcacgcctgtctctagcgcaggaggcgtggccatcaaagctggctccctgattgccgtgcttatcctgcgacagactaacaattacaactcagatgactttcagttcgtctggaatatatacgcgaacaatgatgttgtggtaccaaccgggggatgcgacgtgagtgcacgtgatgtcacagtgactttgcccgactatcctggtagcgttccaatcccgctcaccgtgtactgtgccaagtctcaaaacctgggctattacctgtccgggacaaccgctgatgccggaaattcaatttttacgaacactgctagcttcagtcccgcacagggcgtcggtgtgcagctcacaagacaggggaccatcattcctgccgacaatactgtatctttaggagcggttggcacatccgccgtgagcctgggccttaccgcaaactatgctaggactgggggacaagtcaccgccggtaacgtgcagtcgatcataggcgtcacatttgtgtaccagccaggggatggaaatgctgacgttactattaccgtgaacggcaaagtagtcgccaagtctggtgggatgcagatctatgagggcaagttgacagcagaaggactgcggttcggcattgtggcctcccgctttaatcacgctctagttgacagactcgtggagggggcgatcgatgcaatcgtcaggcatggaggtcgggaagaggacattactctggtgcgcgtacccggctcatgggagatacctgtggccgctggggaacttgcccgaaaagaggatatcgacgcagttattgccatcggagtcctgataagaggcgctaccccacacttcgattacattgccagtgaagtgagcaagggtttggcagacctctccctggagttaaggaaacccatcacatttggggtgatcaccgcggatactctggagcaagctattgaacgggccggcacgaagcatggaaacaaaggctgggaggcagccctctctgctatcgaaatggccaatcttttcaagagcctgcgttga

SEQ ID NO: 590 - RNA, 1422 nt, synthetic construct
  misc_feature 1..1422: note Artificial____HsIgE(1-18)_Ec(J96)-FimH(22-300_N28S_V48C_L55 C_N91S_N249Q)_Linker-PGDGN_Ec(J96)-FimG(24-37)_Linker-SGG_L umSynth(1-154_C37A_N102D) CDS opt3
  source 1..1422: mol_type = other RNA
atggactggacctggatcctgttcctcgtggccgctgcaacaagagtccacagctttgcctgcaagactgcgtccggcacggctattcccatagggggaggttctgccaacgtttacgtgaatcttgcaccttgtgtaaacgtgggccagaattgcgtcgtggatctgtcaacccaaatcttctgtcataacgactatccagagacaattactgattacgttaccttgcagagggggagtgcctatggaggcgtgttaagctccttttctggtacagtcaaatactcggggtcaagctatccgttccccaccacgagtgaaacacctcgggtggtatacaattcccgcaccgacaagccatggcccgttgctctgtatctaacgcctgtgtctagcgcaggaggcgtcgccatcaaagctggctccctcattgccgtgctgatccttcgacagactaacaattacaactcagatgactttcagttcgtgtggaatatatacgcgaacaatgatgtcgttgtgccaaccgggggatgcgacgtaagtgcacgtgatgtgacagtcactctgcccgactatcctggtagcgtgccaatcccgttgaccgtttactgtgccaagtctcaaaacctcggctattacctgtccgggacaaccgctgatgccggaaattcaatttttacgaacactgctagcttcagtcccgcacagggcgtgggtgtccagctgacaagacaggggaccatcattcctgccaataacactgtgtctctcggagcggtaggcacatccgccgttagcttaggcctgaccgcaaactatgctaggactgggggacaagtgaccgccggtaatgtccagtcgatcataggcgtgacatttgtctaccagccaggggacggaaacgctgatgtgactattaccgttaatggcaaagtggtagccaagtctggtgggatgcagatctatgagggcaagctaacagcagaaggattgcggttcggcattgtcgcctcccgctttaaccacgctctggtggacagacttgttgagggggcgatcgacgcaatcgtgaggcatggaggtcgggaagaggatattactctcgtccgcgtgcccggctcatgggagatacctgtagccgctggggaactggcccgaaaagaggacatcgatgcagtgattgccatcggagttcttataagaggcgctaccccacacttcgactacattgccagtgaagtcagcaagggtctggcagatttgtccctcgagctgaggaaacccatcacatttggggtgatcaccgcggacactttagagcaagctattgaacgggccggcacgaagcatggaaataaaggctgggaggcagccctgtctgctatcgaaatggccaacctcttcaagagccttcgttga

SEQ ID NO: 591 - RNA, 1422 nt, synthetic construct
  misc_feature 1..1422: note Artificial____HsIgE(1-18)_Ec(J96)-FimH(22-300_F165V)_Linker -PGDGN_Ec(J96)-FimG(24-37)_Linker-SGG_LumSynth(1-154_C37A_N 102D) CDS opt3
  source 1..1422: mol_type = other RNA
atggactggacctggatcctgttcctcgtggccgctgcaacaagagtccacagctttgcctgcaagactgcgaacggcacggctattcccatagggggaggttccgccaatgtttacgtgaaccttgcacctgtagtgaatgtcggccagaacctggtggttgatttgtctacccaaatcttctgtcataatgactatccagagacaattactgattacgtgaccttacagagggggtcagcctatggaggcgtcctgagtaactttagcggtacagtgaaatactccgggtcttcgtatccgttccccaccacttcagaaacacctcgggtagtttacaatagccgcaccgacaagccatggcccgtggctctatatctcacgcctgtcagttccgcaggaggcgtggccatcaaagctggctctctgattgccgtgcttatcctgcgacagactaacaattacaacagcgatgactttcaggtcgtttggaatatatacgcgaacaatgatgtggtagtgccaaccgggggatgcgacgtctccgcacgtgatgtgacagttactttgcccgactatcctggttcagtgccaatcccgctcaccgtctactgtgccaagagtcaaaacctgggctattacctgagcgggacaaccgctgatgccggaaattctattttcacgaacactgcatccttttcacccgctcagggcgtgggtgtacagctcacaagaaacgggaccatcattcctgccaataacactgttagcttaggagcggtgggcacaagtgccgtctctctgggccttaccgcaaattatgctaggaccgggggacaggtgacggccggtaacgtccaatccatcataggcgtgacattcgtttaccagccaggggacggaaatgctgatgtgactattaccgtaaacggcaaagtcgtggccaagagcggtgggatgcagatctatgagggcaagttgacagcagaaggactgcggtttggcattgttgcctcgcgcttcaatcacgctctagtggacagactcgtcgagggggcgatcgacgcaatcgtgaggcatggaggtcgggaagaggatattactctggtacgcgtgcccggctcttgggagatacctgttgccgctggggaacttgcccgaaaagaggacatcgatgcagtcattgccatcggagtgctgataagaggcgctaccccacactttgactacattgcctccgaagtgtcaaagggtttggcagatctcagtctggagttaaggaaacccatcacattcggggtcatcaccgcggacactctggagcaggctattgaacgggccggcacgaagcatggaaacaaaggctgggaggcagccctcagcgctatcgaaatggccaatctttttaagtccctgcgttga

SEQ ID NO: 592 - RNA, 1449 nt, synthetic construct
  misc_feature 1..1449: note Artificial____HsIgE(1-18)_Ec(J96)-FimH(22-300_N28S_N91S_N24 9Q)_Linker-PGDGN_Ec(J96)-FimG(24-37)_Linker-SGG_Ferritin(5- 167_N19Q) CDS opt3
  source 1..1449: mol_type = other RNA
atggactggacctggatcctgttcctcgtggccgctgcaacaagagtccacagctttgcctgcaagactgcgtccggcacggctattcccatagggggaggttctgccaacgtttacgtgaatcttgcacctgtagtgaacgtcggccagaatctggtggttgatttgtcaacccaaatcttctgtcataacgactatccagagacaattactgattacgtgaccttacagagggggagtgcctatggaggcgtcctgagctccttttctggtacagtgaaatactcggggtcaagctatccgttccccaccacgagtgaaacacctcgggtagtttacaattcccgcaccgacaagccatggcccgtggctctatatctcacgcctgtctctagcgcaggaggcgtggccatcaaagctggctccctgattgccgtgcttatcctgcgacagactaacaattacaactcagatgactttcagttcgtctggaatatatacgcgaacaatgatgttgtggtaccaaccgggggatgcgacgtgagtgcacgtgatgtcacagtgactttgcccgactatcctggtagcgttccaatcccgctcaccgtgtactgtgccaagtctcaaaacctgggctattacctgtccgggacaaccgctgatgccggaaattcaatttttacgaacactgctagcttcagtcccgcacagggcgtcggtgtgcagctcacaagacaggggaccatcattcctgccaataacactgtatctttaggagcggttggcacatccgccgtgagcctgggccttaccgcaaactatgctaggactgggggacaagtcaccgccggtaatgtgcagtcgatcataggcgtcacatttgtgtaccagccaggggacggaaacgctgatgttactattaccgtgaatggcaaagtagtcgccaagtctggtggggacatcattaagttgctgaacgaacaggtgaataaagagatgcaatcctcaaacctatatatgagtatgagctcctggtgctacacacactctctcgacggcgcaggactgttcctttttgatcatgccgctgaggaatacgagcacgcgaagaaactgatcatcttcttgaatgagaacaatgttcccgtgcagctcactagcatttcagcacctgaacataagtttgagggcctgacccagatattccaaaaagcctatgaacacgagcagcacatcagtgagtccattaacaatatcgtcgaccatgctataaagagcaaggatcacgccacattcaactttttacagtggtacgtggcagaacagcatgaggaagaggtactgttcaaagacattctcgataagatcgaacttatcgggaatgagaaccacggactgtatttggccgaccaatacgtgaaaggtattgctaagtctcggaaatcatga

SEQ ID NO: 593 - RNA, 1449 nt, synthetic construct
  misc_feature 1..1449: note Artificial____HsIgE(1-18)_Ec(J96)-FimH(22-300_N28S_N91S_N24 9Q_N256D)_Linker-PGDGN_Ec(J96)-FimG(24-37)_Linker-SGG_Ferri tin(5-167_N19Q) CDS opt3
  source 1..1449: mol_type = other RNA
atggactggacctggatcctgttcctcgtggccgctgcaacaagagtccacagctttgcctgcaagactgcgtccggcacggctattcccatagggggaggttctgccaacgtttacgtgaatcttgcacctgtagtgaacgtcggccagaatctggtggttgatttgtcaacccaaatcttctgtcataacgactatccagagacaattactgattacgtgaccttacagagggggagtgcctatggaggcgtcctgagctccttttctggtacagtgaaatactcggggtcaagctatccgttccccaccacgagtgaaacacctcgggtagtttacaattcccgcaccgacaagccatggcccgtggctctatatctcacgcctgtctctagcgcaggaggcgtggccatcaaagctggctccctgattgccgtgcttatcctgcgacagactaacaattacaactcagatgactttcagttcgtctggaatatatacgcgaacaatgatgttgtggtaccaaccgggggatgcgacgtgagtgcacgtgatgtcacagtgactttgcccgactatcctggtagcgttccaatcccgctcaccgtgtactgtgccaagtctcaaaacctgggctattacctgtccgggacaaccgctgatgccggaaattcaatttttacgaacactgctagcttcagtcccgcacagggcgtcggtgtgcagctcacaagacaggggaccatcattcctgccgacaatactgtatctttaggagcggttggcacatccgccgtgagcctgggccttaccgcaaactatgctaggactgggggacaagtcaccgccggtaacgtgcagtcgatcataggcgtcacatttgtgtaccagccaggggatggaaatgctgacgttactattaccgtgaacggcaaagtagtcgccaagtctggtggggacatcattaagttgctgaatgaacaggtgaacaaagagatgcaatcctcaaatctatatatgagtatgagctcctggtgctacacacactctctcgatggcgcaggactgttcctttttgaccatgccgctgaggaatacgagcacgcgaagaaactgatcatcttcttgaacgagaataacgttcccgtgcagctcactagcatttcagcacctgaacataagtttgagggcctgacccagatattccaaaaagcctatgaacacgagcagcacatcagtgagtccattaataacatcgtcgatcatgctataaagagcaaggaccacgccacattcaactttttacagtggtacgtggcagaacagcatgaggaagaggtactgttcaaagatattctcgacaagatcgaacttatcgggaatgagaatcacggactgtatttggccgatcaatacgtgaaaggtattgctaagtctcggaaatcatga

SEQ ID NO: 594 - RNA, 1449 nt, synthetic construct
  misc_feature 1..1449: note Artificial____HsIgE(1-18)_Ec(J96)-FimH(22-300_N28S_V48C_L55 C_N91S_N249Q)_Linker-PGDGN_Ec(J96)-FimG(24-37)_Linker-SGG_F erritin(5-167_N19Q) CDS opt3
  source 1..1449: mol_type = other RNA
atggactggacctggatcctgttcctcgtggccgctgcaacaagagtccacagctttgcctgcaagactgcgtccggcacggctattcccatagggggaggttctgccaacgtttacgtgaatcttgcaccttgtgtaaacgtgggccagaattgcgtcgtggatctgtcaacccaaatcttctgtcataacgactatccagagacaattactgattacgttaccttgcagagggggagtgcctatggaggcgtgttaagctccttttctggtacagtcaaatactcggggtcaagctatccgttccccaccacgagtgaaacacctcgggtggtatacaattcccgcaccgacaagccatggcccgttgctctgtatctaacgcctgtgtctagcgcaggaggcgtcgccatcaaagctggctccctcattgccgtgctgatccttcgacagactaacaattacaactcagatgactttcagttcgtgtggaatatatacgcgaacaatgatgtcgttgtgccaaccgggggatgcgacgtaagtgcacgtgatgtgacagtcactctgcccgactatcctggtagcgtgccaatcccgttgaccgtttactgtgccaagtctcaaaacctcggctattacctgtccgggacaaccgctgatgccggaaattcaatttttacgaacactgctagcttcagtcccgcacagggcgtgggtgtccagctgacaagacaggggaccatcattcctgccaataacactgtgtctctcggagcggtaggcacatccgccgttagcttaggcctgaccgcaaactatgctaggactgggggacaagtgaccgccggtaatgtccagtcgatcataggcgtgacatttgtctaccagccaggggacggaaacgctgatgtgactattaccgttaatggcaaagtggtagccaagtctggtggggacatcattaaacttttgaacgagcaggtcaataaggaaatgcaatcctcaaacctgtatatgagtatgagctcctggtgctacacacactctctagacggcgcaggactcttcctgtttgatcatgccgctgaggaatacgagcacgcgaagaaacttatcatcttcctgaatgagaacaatgtgcccgttcagttgactagcatttcagcacctgaacataagtttgagggcctcacccagatattccaaaaagcctatgaacacgagcagcacatcagtgagtccattaacaatatcgtggaccatgctataaagagcaaggatcacgccacattcaactttctgcagtggtacgtcgcagaacagcatgaggaagaggtgttattcaaagacattctggataagatcgaactcatcgggaatgagaaccacggactttatctggccgaccaatacgtaaaaggtattgctaagtctcggaaatcatga

SEQ ID NO: 595 - RNA, 1449 nt, synthetic construct
  misc_feature 1..1449: note Artificial____HsIgE(1-18)_Ec(J96)-FimH(22-300_F165V)_Linker -PGDGN_Ec(J96)-FimG(24-37)_Linker-SGG_Ferritin(5-167_N19Q) CDS opt3
  source 1..1449: mol_type = other RNA
atggactggacctggatcctgttcctcgtggccgctgcaacaagagtccacagctttgcctgcaagactgcgaacggcacggctattcccatagggggaggttccgccaatgtttacgtgaaccttgcacctgtagtgaatgtcggccagaacctggtggttgatttgtctacccaaatcttctgtcataatgactatccagagacaattactgattacgtgaccttacagagggggtcagcctatggaggcgtcctgagtaactttagcggtacagtgaaatactccgggtcttcgtatccgttccccaccacttcagaaacacctcgggtagtttacaatagccgcaccgacaagccatggcccgtggctctatatctcacgcctgtcagttccgcaggaggcgtggccatcaaagctggctctctgattgccgtgcttatcctgcgacagactaacaattacaacagcgatgactttcaggtcgtttggaatatatacgcgaacaatgatgtggtagtgccaaccgggggatgcgacgtctccgcacgtgatgtgacagttactttgcccgactatcctggttcagtgccaatcccgctcaccgtctactgtgccaagagtcaaaacctgggctattacctgagcgggacaaccgctgatgccggaaattctattttcacgaacactgcatccttttcacccgctcagggcgtgggtgtacagctcacaagaaacgggaccatcattcctgccaataacactgttagcttaggagcggtgggcacaagtgccgtctctctgggccttaccgcaaattatgctaggaccgggggacaggtgacggccggtaacgtccaatccatcataggcgtgacattcgtttaccagccaggggacggaaatgctgatgtgactattaccgtaaacggcaaagtcgtggccaagagcggtggggacatcattaagttgctgaatgagcaggttaacaaagaaatgcagtcgtctaatctatatatgtccatgtcaagttggtgctacacacacagcctcgacggcgcaggactgtttcttttcgatcatgccgctgaggaatacgagcacgcgaagaaactgatcatctttttgaacgagaataacgtgcccgtccaactcacttccatttctgcacctgaacataagttcgagggcctgacccagatatttcagaaagcctatgaacacgagcaacacatcagcgagtcaattaataacatcgtggaccatgctataaagagtaaggatcacgccacattcaatttcttacagtggtacgtagcagaacagcatgaggaagaggtgctgtttaaagacattctcgataagatcgaacttatcgggaacgagaaccacggactgtatttggccgaccagtacgttaaaggtattgctaagtcccggaaaagctga

SEQ ID NO: 596 - RNA, 726 nt, synthetic construct
  misc_feature 1..726: note Artificial____Ec(J96)-FimC(1-36)_Ec(J96)-FimC(37-241) CDS opt3
  source 1..726: mol_type = other RNA
atgagcaacaagaacgtgaacgtgcggaagtcccaagagatcaccttctgtctgctggccggcatcctgatgtttatggccatgatggtggccggcagagccgaagctggtgttgctcttggagccaccagagtgatctacccagccggccagaaacaggtgcagctggccgtgaccaacaacgacgagaacagcacctacctgatccagagctgggtcgagaatgccgacggcgtgaaggacggcagattcatcgttacccctccactgttcgccatgaagggcaagaaagagaacaccctgcggatcctggacgccaccaacaatcagctgccccaggacagagaaagcctgttctggatgaacgtgaaggctatccccagcatggacaagagcaagctgaccgagaataccctgcagctcgccatcatcagccggatcaagctgtactacagacccgccaaactggccctgcctccagatcaggctgccgagaaactgcggttcagaagaagcgccaacagcctgacactgatcaaccccacaccttactacctgaccgtgaccgagctgaacgccggcacaagagtgctggaaaatgccctggttcctcctatgggcgagagcaccgtgaagctgccatctgatgccggctccaacatcacctaccggaccatcaacgactacggcgccctgacacctaagatgaccggcgtgatggaatga

SEQ ID NO: 597 - RNA, 672 nt, synthetic construct
  misc_feature 1..672: note = Artificial____HsIgE(1-18)_Ec(J96)-FimC(37-241) CDS opt3
  source 1..672: mol_type = other RNA
atggactggacctggatcctgtttctggtggccgctgccacaagagtgcatagcggagttgctctgggagccaccagagtgatctatcctgccggccagaagcaggttcagctggccgtgaccaacaacgacgagaacagcacctacctgatccagagctgggtcgagaatgccgacggcgtgaaggacggcagattcatcgttacccctccactgttcgccatgaagggcaagaaagagaacaccctgcggatcctggacgccaccaacaatcagctgccccaggacagagaaagcctgttctggatgaacgtgaaggctatccccagcatggacaagagcaagctgaccgagaataccctgcagctggccatcatcagccggatcaagctgtactacagacccgccaaactggccctgcctccagatcaggctgccgagaaactgcggttcagaagaagcgccaacagcctgacactgatcaaccccacaccttactacctgaccgtgaccgagctgaacgccggaaccagagtgctggaaaatgccctggttcctcctatgggcgagagcaccgtgaagctgccatctgatgccggcagcaacatcacctaccggaccatcaacgactacggcgccctgacacctaagatgaccggcgtgatggaatga

SEQ ID NO: 598 - RNA, 903 nt, synthetic construct
  misc_feature 1..903: note Artificial____Ec(J96)-FimH(1-21)_Ec(J96)-FimH(22-300) CDS opt3
  source 1..903: mol_type = other RNA
atgaagcgcgtgatcaccctgtttgccgtgctgcttatgggctggagcgtgaacgcctggtcctttgcctgcaagaccgccaacggaaccgccattcctatcggcggaggatccgccaatgtgtatgtgaatctggcccctgtggtcaacgtgggccagaacctggtggtggatctgagcacccagatcttttgccacaacgactaccccgagacaatcaccgactacgtgaccctgcagagaggctctgcttacggcggcgtgctgagcaatttttccggcaccgtgaagtacagcggcagcagctacccatttcctaccaccagcgagacacccagagtggtgtacaacagcagaaccgacaagccctggcctgtggctctgtacctgacacctgttagctctgctggcggcgtggccattaaggccggatctctgatcgccgtgctgatcctgagacagaccaacaactacaacagcgacgacttccagttcgtgtggaacatctacgccaacaacgacgtggtggtgcctacaggcggctgtgatgtgtctgccagagatgtgaccgtgacactgcctgactaccctggcagcgtgccaattcctctgaccgtgtactgtgccaagagccagaatctgggctactacctgagcggcacaacagccgatgccggcaacagcatcttcaccaacaccgccagcttcagccctgctcaaggtgttggagtgcagctgacccggaacggcacaatcatccccgccaacaataccgtgtctctgggcgctgttggcaccagcgctgtttctctgggactgaccgccaattacgccagaacaggcggacaagtgaccgccggcaatgtgcagtctatcatcggcgtgaccttcgtgtaccagtga

SEQ ID NO: 599 - RNA, 894 nt, synthetic construct
  misc_feature 1..894: note = Artificial____HsIgE(1-18)_Ec(J96)-FimH(22-300) CDS opt3
  source 1..894: mol_type = other RNA
atggactggacctggatcctgtttctggtggccgctgccacaagagtgcacagctttgcctgcaagaccgccaacggcaccgccattcctattggcggaggatccgccaatgtgtatgtgaatctggcccctgtggtcaacgtgggccagaacctggtggtggatctgagcacccagatcttttgccacaacgactaccccgagacaatcaccgactacgtgaccctgcagagaggctctgcttacggcggcgtgctgagcaatttttccggcaccgtgaagtacagcggcagcagctacccatttcctaccaccagcgagacacccagagtggtgtacaacagcagaaccgacaagccctggcctgtggctctgtacctgacacctgttagctctgctggcggcgtggccattaaggccggatctctgattgccgtgctgatcctgcggcagaccaacaactacaacagcgacgacttccagttcgtgtggaacatctacgccaacaacgacgtggtggtgcctacaggcggctgtgatgtgtctgccagagatgtgaccgtgacactgcctgactaccctggcagcgtgccaattcctctgaccgtgtactgtgccaagagccagaatctgggctactacctgagcggcacaacagccgatgccggcaacagcatcttcaccaacaccgccagcttcagccctgctcaaggtgttggagtgcagctgacccggaacggcacaatcatccccgccaacaataccgtgtctctgggcgctgttggcaccagcgctgtttctctgggactgaccgccaattacgccagaacaggcggacaagtgaccgccggcaatgtgcagtctatcatcggcgtgaccttcgtgtaccagtga

SEQ ID NO: 600 - RNA, 900 nt, synthetic construct
  misc_feature 1..900: note = Artificial____MmIgK(1-20)_Ec(J96)-FimH(22-300) CDS opt3
  source 1..900: mol_type = other RNA
atggaaaccgacacactgctgctgtgggtgctgcttctttgggtgcccggctctacaggctttgcctgcaagacagccaacggcaccgccattcctatcggcggaggatccgccaatgtgtatgtgaatctggcccctgtggtcaacgtgggccagaacctggtggtggatctgagcacccagatcttttgccacaacgactaccccgagacaatcaccgactacgtgaccctgcagagaggctctgcttacggcggcgtgctgagcaatttttccggcaccgtgaagtacagcggcagcagctacccatttcctaccaccagcgagacacccagagtggtgtacaacagcagaaccgacaagccctggcctgtggctctgtacctgacacctgttagctctgctggcggcgtggccattaaggccggatctctgattgccgtgctgatcctgcggcagaccaacaactacaacagcgacgacttccagttcgtgtggaacatctacgccaacaacgacgtggtggtgcctacaggcggctgtgatgtgtctgccagagatgtgaccgtgacactgcctgactaccctggcagcgtgccaattcctctgaccgtgtactgtgccaagagccagaatctgggctactacctgagcggcacaacagccgatgccggcaacagcatcttcaccaacaccgccagcttcagccctgctcaaggtgttggagtgcagctgacccggaacggcacaatcatccccgccaacaataccgtgtctctgggcgctgttggcaccagcgctgtttctctgggactgaccgccaactacgccagaacaggcggacaagtgacagccggcaatgtgcagtctatcatcggcgtgaccttcgtgtaccagtga

SEQ ID NO: 601 - RNA, 960 nt, synthetic construct
  misc_feature 1..960: note Artificial____Ec(J96)-FimH(1-21)_Ec(J96)-FimH(22-300)_Linke r-PGDGN_Ec(J96)-FimG(24-37) CDS opt3
  source 1..960: mol_type = other RNA
atgaagcgcgtgatcaccctgtttgccgtgctgcttatgggctggagcgtgaacgcctggtcctttgcctgcaagaccgccaacggaaccgccattcctatcggcggaggatccgccaatgtgtatgtgaatctggcccctgtggtcaacgtgggccagaacctggtggtggatctgagcacccagatcttttgccacaacgactaccccgagacaatcaccgactacgtgaccctgcagagaggctctgcttacggcggcgtgctgagcaatttttccggcaccgtgaagtacagcggcagcagctacccatttcctaccaccagcgagacacccagagtggtgtacaacagcagaaccgacaagccctggcctgtggctctgtacctgacacctgttagctctgctggcggcgtggccattaaggccggatctctgatcgccgtgctgatcctgagacagaccaacaactacaacagcgacgacttccagttcgtgtggaacatctacgccaacaacgacgtggtggtgcctacaggcggctgtgatgtgtctgccagagatgtgaccgtgacactgcctgactaccctggcagcgtgccaattcctctgaccgtgtactgtgccaagagccagaatctgggctactacctgagcggcacaacagccgatgccggcaacagcatcttcaccaacaccgccagcttcagccctgctcaaggtgttggagtgcagctgacccggaacggcacaatcatccccgccaacaataccgtgtctctgggcgctgttggcaccagcgctgtttctctgggactgaccgccaattacgccagaacaggcggacaagtgaccgccggcaatgtgcagtctatcatcggcgtgaccttcgtgtaccagcctggcgacggaaatgccgacgtgaccatcaccgtgaacggaaaggtggtggccaagtga

SEQ ID NO: 602 - RNA, 951 nt, synthetic construct
  misc_feature 1..951: note Artificial____HsIgE(1-18)_Ec(J96)-FimH(22-300)_Linker-PGDGN _Ec(J96)-FimG(24-37) CDS opt3
  source 1..951: mol_type = other RNA
atggactggacctggatcctgtttctggtggccgctgccacaagagtgcacagctttgcctgcaagaccgccaacggcaccgccattcctattggcggaggatccgccaatgtgtatgtgaatctggcccctgtggtcaacgtgggccagaacctggtggtggatctgagcacccagatcttttgccacaacgactaccccgagacaatcaccgactacgtgaccctgcagagaggctctgcttacggcggcgtgctgagcaatttttccggcaccgtgaagtacagcggcagcagctacccatttcctaccaccagcgagacacccagagtggtgtacaacagcagaaccgacaagccctggcctgtggctctgtacctgacacctgttagctctgctggcggcgtggccattaaggccggatctctgattgccgtgctgatcctgcggcagaccaacaactacaacagcgacgacttccagttcgtgtggaacatctacgccaacaacgacgtggtggtgcctacaggcggctgtgatgtgtctgccagagatgtgaccgtgacactgcctgactaccctggcagcgtgccaattcctctgaccgtgtactgtgccaagagccagaatctgggctactacctgagcggcacaacagccgatgccggcaacagcatcttcaccaacaccgccagcttcagccctgctcaaggtgttggagtgcagctgacccggaacggcacaatcatccccgccaacaataccgtgtctctgggcgctgttggcaccagcgctgtttctctgggactgaccgccaattacgccagaacaggcggacaagtgaccgccggcaatgtgcagtctatcatcggcgtgaccttcgtgtaccagcctggcgacggaaatgccgacgtgaccatcaccgtgaacggaaaggtggtggccaagtga

SEQ ID NO: 603 - RNA, 957 nt, synthetic construct
  misc_feature 1..957: note Artificial____HsIgE(1-18)_Ec(J96)-FimH(22-300)_Linker-G4SGG _Ec(J96)-FimG(24-37) CDS opt3
  source 1..957: mol_type = other RNA
atggactggacctggatcctgtttctggtggccgctgccacaagagtgcacagctttgcctgcaagaccgccaacggcaccgccattcctattggcggaggatccgccaatgtgtatgtgaatctggcccctgtggtcaacgtgggccagaacctggtggtggatctgagcacccagatcttttgccacaacgactaccccgagacaatcaccgactacgtgaccctgcagagaggctctgcttacggcggcgtgctgagcaatttttccggcaccgtgaagtacagcggcagcagctacccatttcctaccaccagcgagacacccagagtggtgtacaacagcagaaccgacaagccctggcctgtggctctgtacctgacacctgttagctctgctggcggcgtggccattaaggccggatctctgattgccgtgctgatcctgcggcagaccaacaactacaacagcgacgacttccagttcgtgtggaacatctacgccaacaacgacgtggtggtgcctacaggcggctgtgatgtgtctgccagagatgtgaccgtgacactgcctgactaccctggcagcgtgccaattcctctgaccgtgtactgtgccaagagccagaatctgggctactacctgagcggcacaacagccgatgccggcaacagcatcttcaccaacaccgccagcttcagccctgctcaaggtgttggagtgcagctgacccggaacggcacaatcatccccgccaacaataccgtgtctctgggcgctgttggcaccagcgctgtttctctgggactgaccgccaattacgccagaacaggcggacaagtgaccgccggcaatgtgcagtctatcatcggcgtgaccttcgtgtaccaaggcggaggcggatctggcggagccgatgtgacaatcacagtgaacggaaaggtggtggccaagtga

SEQ ID NO: 604 - RNA, 957 nt, synthetic construct
  misc_feature 1..957: note Artificial____MmIgK(1-20)_Ec(J96)-FimH(22-300)_Linker-PGDGN _Ec(J96)-FimG(24-37) CDS opt3
  source 1..957: mol_type = other RNA
atggaaaccgacacactgctgctgtgggtgctgcttctttgggtgcccggctctacaggctttgcctgcaagacagccaacggcaccgccattcctatcggcggaggatccgccaatgtgtatgtgaatctggcccctgtggtcaacgtgggccagaacctggtggtggatctgagcacccagatcttttgccacaacgactaccccgagacaatcaccgactacgtgaccctgcagagaggctctgcttacggcggcgtgctgagcaatttttccggcaccgtgaagtacagcggcagcagctacccatttcctaccaccagcgagacacccagagtggtgtacaacagcagaaccgacaagccctggcctgtggctctgtacctgacacctgttagctctgctggcggcgtggccattaaggccggatctctgattgccgtgctgatcctgcggcagaccaacaactacaacagcgacgacttccagttcgtgtggaacatctacgccaacaacgacgtggtggtgcctacaggcggctgtgatgtgtctgccagagatgtgaccgtgacactgcctgactaccctggcagcgtgccaattcctctgaccgtgtactgtgccaagagccagaatctgggctactacctgagcggcacaacagccgatgccggcaacagcatcttcaccaacaccgccagcttcagccctgctcaaggtgttggagtgcagctgacccggaacggcacaatcatccccgccaacaataccgtgtctctgggcgctgttggcaccagcgctgtttctctgggactgaccgccaactacgccagaacaggcggacaagtgacagccggcaatgtgcagtctatcatcggcgtgaccttcgtgtaccagcctggcgacggaaatgccgacgtgaccatcaccgtgaacggaaaggtggtggccaagtga

SEQ ID NO: 605 - RNA, 957 nt, synthetic construct
  misc_feature 1..957: note Artificial____MmIgK(1-20)_Ec(536)-FimH(22-300)_Linker-PGDGN _Ec(J96)-FimG(24-37) CDS opt3
  source 1..957: mol_type = other RNA
atggaaaccgacacactgctgctgtgggtgctgcttctttgggtgcccggctctacaggctttgcctgcaagacagccaacggcaccgccattcctatcggcggaggatccgccaatgtgtatgtgaatctggcccctgccgtgaacgtgggccagaatctggtggtggatctgagcacccagatcttttgccacaacgactaccccgagacaatcaccgactacgtgaccctgcagagaggctctgcttacggcggagtgctgagcagctttagcggcaccgtgaagtacaacggcagcagctacccatttcctaccaccagcgagacacccagagtggtgtacaacagcagaaccgacaagccctggcctgtggctctgtacctgacacctgttagctctgctggcggcgtggccattaaggccggatctctgattgccgtgctgatcctgcggcagaccaacaactacaacagcgacgacttccagttcgtgtggaacatctacgccaacaacgacgtggtggtgcctacaggcggctgtgatgtgtctgccagagatgtgaccgtgacactgcctgactaccctggcagcgtgccaattcctctgaccgtgtactgtgccaagagccagaacctgggctactacctgtctggcacaacagccgatgccggcaacagcatcttcaccaacacagccagcttcagccccgctcaaggtgttggagtgcagctgaccagaaacggcacaatcatccccgccaacaataccgtgtctctgggcgctgttggcaccagcgctgtttctctgggactgaccgccaactacgccagaacaggcggacaagtgacagccggcaatgtgcagtctatcatcggcgtgaccttcgtgtaccagcctggcgacggaaatgccgacgtgaccatcaccgtgaacggaaaggtggtggccaagtga

SEQ ID NO: 606 - RNA, 981 nt, synthetic construct
  misc_feature 1..981: note Artificial____HsIgE(1-18)_Ec(J96)-FimH(22-300)_Linker-(G4S) 3_Ec(J96)-FimC(135-148) CDS opt3
  source 1..981: mol_type = other RNA
atggactggacctggatcctgtttctggtggccgctgccacaagagtgcacagctttgcctgcaagaccgccaacggcaccgccattcctattggcggaggatccgccaatgtgtatgtgaatctggcccctgtggtcaacgtgggccagaacctggtggtggatctgagcacccagatcttttgccacaacgactaccccgagacaatcaccgactacgtgaccctgcagagaggctctgcttacggcggcgtgctgagcaatttttccggcaccgtgaagtacagcggcagcagctacccatttcctaccaccagcgagacacccagagtggtgtacaacagcagaaccgacaagccctggcctgtggctctgtacctgacacctgttagctctgctggcggcgtggccattaaggccggatctctgattgccgtgctgatcctgcggcagaccaacaactacaacagcgacgacttccagttcgtgtggaacatctacgccaacaacgacgtggtggtgcctacaggcggctgtgatgtgtctgccagagatgtgaccgtgacactgcctgactaccctggcagcgtgccaattcctctgaccgtgtactgtgccaagagccagaatctgggctactacctgagcggcacaacagccgatgccggcaacagcatcttcaccaacaccgccagcttcagccctgctcaaggtgttggagtgcagctgacccggaacggcacaatcatccccgccaacaataccgtgtctctgggcgctgttggcaccagcgctgtttctctgggactgaccgccaattacgccagaacaggcggacaagtgaccgccggcaatgtgcagtctatcatcggcgtgaccttcgtgtaccaaggcggaggcggatctggtggcggaggcagtggtggcggtggatctacagagaatactctgcagctggccatcatcagccggatcaagtga

SEQ ID NO: 607 - RNA, 1404 nt, synthetic construct
  misc_feature 1..1404: note Artificial____LumSynth(1-154_C37A_N102D)_Linker(GGS)4-GGG_E c(J96)-FimH(22-300)_Linker-PGDGN_Ec(J96)-FimG(24-37) CDS opt3
  source 1..1404: mol_type = other RNA
atgcagatctacgagggcaagctgaccgccgagggcctgagatttggaatcgtggccagccggttcaatcacgccctggtggatagactggtggaaggcgccatcgatgccattgtcagacacggcggcagagaagaggacatcaccctcgttagagtgcccggctcttgggagattcctgtggctgctggcgagctggcccggaaagaagatatcgacgccgttatcgccatcggcgtgctgatcagaggcgccacacctcacttcgactatatcgccagcgaggtgtccaaaggcctggccgatctgagcctggaactgagaaagcccatcaccttcggcgtgatcaccgctgacacactggaacaggccattgagagagccggcaccaagcacggcaacaaaggatgggaagccgctctgtccgccatcgagatggccaacctgttcaagagcctgagaggcggctctggtggttctggcggatcaggtggaagtggcggaggatttgcctgcaagaccgccaacggaaccgccattcctatcggaggcggaagcgccaatgtgtatgtgaatctggcccctgtggtcaacgtgggccagaacctggtggtggatctgagcacccagatcttttgccacaacgactaccccgagacaatcaccgactacgtgaccctgcagagaggctctgcttacggcggagtgctgagcaatttcagcggcaccgtgaagtacagcggcagcagctacccatttcctaccaccagcgagacacccagagtggtgtacaacagcagaaccgacaagccctggcctgtggctctgtacctgacacctgttagctctgctggcggcgtggcaatcaaagccggatctctgatcgctgtgctgatcctgcggcagaccaacaactacaacagcgacgacttccagttcgtgtggaacatctacgccaacaacgacgtggtggtgcctacaggcggctgtgatgtgtctgccagagatgtgaccgtgacactgcctgactaccctggcagcgtgccaattcctctgaccgtgtactgtgccaagagccagaatctgggctactacctgagcggcacaacagccgatgccggcaacagcatcttcaccaacaccgccagcttcagccctgctcaaggtgttggagtgcagctgacccggaacggcacaatcatccccgccaacaataccgtgtctctgggcgctgttggcaccagcgctgtttctctgggactgaccgccaattacgccagaacaggcggacaagtgacagccggcaatgtgcagagcatcatcggagtgaccttcgtgtaccagcctggcgacggaaatgccgacgtgaccatcaccgtgaacggaaaggtggtggccaagtga

SEQ ID NO: 608 - RNA, 1422 nt, synthetic construct
  misc_feature 1..1422: note Artificial____HsIgE(1-18)_Ec(J96)-FimH(22-300)_Linker-PGDGN _Ec(J96)-FimG(24-37)_Linker-SGG_LumSynth(1-154_C37A_N102D) CDS opt3
  source 1..1422: mol_type = other RNA
atggactggacctggatcctgtttctggtggccgctgccacaagagtgcacagctttgcctgcaagaccgccaacggcaccgccattcctattggcggaggatccgccaatgtgtatgtgaatctggcccctgtggtcaacgtgggccagaacctggtggtggatctgagcacccagatcttttgccacaacgactaccccgagacaatcaccgactacgtgaccctgcagagaggctctgcttacggcggcgtgctgagcaatttttccggcaccgtgaagtacagcggcagcagctacccatttcctaccaccagcgagacacccagagtggtgtacaacagcagaaccgacaagccctggcctgtggctctgtacctgacacctgttagctctgctggcggcgtggccattaaggccggatctctgattgccgtgctgatcctgcggcagaccaacaactacaacagcgacgacttccagttcgtgtggaacatctacgccaacaacgacgtggtggtgcctacaggcggctgtgatgtgtctgccagagatgtgaccgtgacactgcctgactaccctggcagcgtgccaattcctctgaccgtgtactgtgccaagagccagaatctgggctactacctgagcggcacaacagccgatgccggcaacagcatcttcaccaacaccgccagcttcagccctgctcaaggtgttggagtgcagctgacccggaacggcacaatcatccccgccaacaataccgtgtctctgggcgctgttggcaccagcgctgtttctctgggactgaccgccaattacgccagaacaggcggacaagtgaccgccggcaatgtgcagtctatcatcggcgtgaccttcgtgtaccagcctggcgacggaaatgccgacgtgaccatcaccgtgaacggaaaggtggtggccaagtctggcggcatgcagatctatgagggcaagctgacagccgagggcctgagatttggaatcgtggccagccggttcaatcacgccctggtggatagactggtggaaggcgccatcgatgccattgtcagacacggcggcagagaagaggacatcaccctcgttagagtgcccggctcttgggagattcctgtggctgctggcgaactggcccggaaagaggatatcgacgccgttatcgccatcggagtgctgatcagaggcgccacacctcacttcgactatatcgccagcgaggtgtccaaaggcctggccgatctgagcctggaactgagaaagcccatcaccttcggcgtgatcaccgctgacacactggaacaggccattgagagagccggcaccaagcacggaaacaaaggatgggaagccgctctgtccgccatcgagatggccaacctgttcaagagcctgcggtga

SEQ ID NO: 609 - RNA, 1449 nt, synthetic construct
  misc_feature 1..1449: note Artificial____HsIgE(1-18)_Ec(J96)-FimH(22-300)_Linker-PGDGN _Ec(J96)-FimG(24-37)_Linker-SGG_Ferritin(5-167_N19Q) CDS opt3
  source 1..1449: mol_type = other RNA
atggactggacctggatcctgtttctggtggccgctgccacaagagtgcacagctttgcctgcaagaccgccaacggcaccgccattcctattggcggaggatccgccaatgtgtatgtgaatctggcccctgtggtcaacgtgggccagaacctggtggtggatctgagcacccagatcttttgccacaacgactaccccgagacaatcaccgactacgtgaccctgcagagaggctctgcttacggcggcgtgctgagcaatttttccggcaccgtgaagtacagcggcagcagctacccatttcctaccaccagcgagacacccagagtggtgtacaacagcagaaccgacaagccctggcctgtggctctgtacctgacacctgttagctctgctggcggcgtggccattaaggccggatctctgattgccgtgctgatcctgcggcagaccaacaactacaacagcgacgacttccagttcgtgtggaacatctacgccaacaacgacgtggtggtgcctacaggcggctgtgatgtgtctgccagagatgtgaccgtgacactgcctgactaccctggcagcgtgccaattcctctgaccgtgtactgtgccaagagccagaatctgggctactacctgagcggcacaacagccgatgccggcaacagcatcttcaccaacaccgccagcttcagccctgctcaaggtgttggagtgcagctgacccggaacggcacaatcatccccgccaacaataccgtgtctctgggcgctgttggcaccagcgctgtttctctgggactgaccgccaattacgccagaacaggcggacaagtgaccgccggcaatgtgcagtctatcatcggcgtgaccttcgtgtaccagcctggcgacggaaatgccgacgtgaccatcaccgtgaacggaaaggtggtggccaagtctggcggcgacatcatcaagctgctgaacgagcaagtgaacaaagagatgcagagcagcaacctgtacatgagcatgagcagctggtgctacacccacagccttgatggcgccggactgttcctgtttgaccatgccgccgaggaatacgagcacgccaagaagctgatcatcttcctgaacgagaacaacgtgcccgtccagctgaccagcatttctgcccctgagcacaagttcgagggcctgacacagatcttccagaaggcctacgaacacgagcagcacatcagcgagagcatcaacaacatcgtggaccacgccattaagagcaaggatcacgccaccttcaactttctgcagtggtacgtggccgaacagcacgaggaagaggtgctgttcaaggacatcctggacaagatcgagctgatcggcaacgagaaccacggcctgtatctggccgaccagtacgtgaagggaatcgccaagtccagaaagagctga

SEQ ID NO: 610 - RNA, 1479 nt, synthetic construct
  misc_feature 1..1479: note Artificial____MmIgK(1-20)_Ec(J96)-FimH(22-300)_Linker-PGDGN _Ec(J96)-FimG(24-37)_Linker-(GGS)4_Ferritin(5-166) CDS opt3
  source 1..1479: mol_type = other RNA
atggaaaccgacacactgctgctgtgggtgctgcttctttgggtgcccggctctacaggctttgcctgcaagacagccaacggcaccgccattcctatcggcggaggatccgccaatgtgtatgtgaatctggcccctgtggtcaacgtgggccagaacctggtggtggatctgagcacccagatcttttgccacaacgactaccccgagacaatcaccgactacgtgaccctgcagagaggctctgcttacggcggcgtgctgagcaatttttccggcaccgtgaagtacagcggcagcagctacccatttcctaccaccagcgagacacccagagtggtgtacaacagcagaaccgacaagccctggcctgtggctctgtacctgacacctgttagctctgctggcggcgtggccattaaggccggatctctgattgccgtgctgatcctgcggcagaccaacaactacaacagcgacgacttccagttcgtgtggaacatctacgccaacaacgacgtggtggtgcctacaggcggctgtgatgtgtctgccagagatgtgaccgtgacactgcctgactaccctggcagcgtgccaattcctctgaccgtgtactgtgccaagagccagaatctgggctactacctgagcggcacaacagccgatgccggcaacagcatcttcaccaacaccgccagcttcagccctgctcaaggtgttggagtgcagctgacccggaacggcacaatcatccccgccaacaataccgtgtctctgggcgctgttggcaccagcgctgtttctctgggactgaccgccaactacgccagaacaggcggacaagtgacagccggcaatgtgcagtctatcatcggcgtgaccttcgtgtaccagcctggcgacggaaatgccgacgtgaccatcaccgtgaacggaaaggtggtggccaaaggcggttctggtggttctggcggaagtggcggcagcgacatcatcaagctgctgaacgagcaagtgaacaaagagatgaacagcagcaacctgtacatgagcatgagcagctggtgctacacacacagcctggatggcgccggactgttcctgtttgatcatgccgccgaggaatacgagcacgccaagaagctgatcatcttcctgaacgagaacaacgtgcccgtccagctgaccagcatttctgcccctgagcacaagttcgagggcctgacacagatcttccagaaggcctacgaacacgagcagcacatcagcgagagcatcaacaacatcgtggaccacgccatcaagagcaaggatcacgccaccttcaactttctgcagtggtacgtggccgaacagcacgaggaagaggtgctgttcaaggacatcctggacaagatcgagctgatcggcaacgagaaccacggcctgtatctggccgaccagtacgtgaagggaatcgccaagtccagaaagtga

SEQ ID NO: 611 - RNA, 1122 nt, synthetic construct
  misc_feature 1..1122: note Artificial____HsIgE(1-18)_Ec(J96)-FimH(22-300)_Linker-PGDGN _Ec(J96)-FimG(24-37)_TMdomain-HA(510-566) CDS opt3
  source 1..1122: mol_type = other RNA
atggactggacctggatcctgtttctggtggccgctgccacaagagtgcacagctttgcctgcaagaccgccaacggcaccgccattcctattggcggaggatccgccaatgtgtatgtgaatctggcccctgtggtcaacgtgggccagaacctggtggtggatctgagcacccagatcttttgccacaacgactaccccgagacaatcaccgactacgtgaccctgcagagaggctctgcttacggcggcgtgctgagcaatttttccggcaccgtgaagtacagcggcagcagctacccatttcctaccaccagcgagacacccagagtggtgtacaacagcagaaccgacaagccctggcctgtggctctgtacctgacacctgttagctctgctggcggcgtggccattaaggccggatctctgattgccgtgctgatcctgcggcagaccaacaactacaacagcgacgacttccagttcgtgtggaacatctacgccaacaacgacgtggtggtgcctacaggcggctgtgatgtgtctgccagagatgtgaccgtgacactgcctgactaccctggcagcgtgccaattcctctgaccgtgtactgtgccaagagccagaatctgggctactacctgagcggcacaacagccgatgccggcaacagcatcttcaccaacaccgccagcttcagccctgctcaaggtgttggagtgcagctgacccggaacggcacaatcatccccgccaacaataccgtgtctctgggcgctgttggcaccagcgctgtttctctgggactgaccgccaattacgccagaacaggcggacaagtgaccgccggcaatgtgcagtctatcatcggcgtgaccttcgtgtaccagcctggcgacggaaatgccgacgtgaccatcaccgtgaacggaaaggtggtggccaaggccaagctgaaccgggaagagatcgatggcgtgaagctggaaagcacccggatctaccagatcctggccatctacagcacagtggcctctagcctggtgctggtggtgtccctgggagccatcagcttttggatgtgcagcaacggcagcctgcagtgccggatctgtatctga

SEQ ID NO: 612 - RNA, 1455 nt, synthetic construct
  misc_feature 1..1455: note Artificial____HsIgE(1-18)_LumSynth(1-154_C37A_N102D)_Linker (GGS)4-GGG_Ec(J96)-FimH(22-300)_Linker-PGDGN_Ec(J96)-FimG(2 4-37) CDS opt3
  source 1..1455: mol_type = other RNA
atggactggacctggatcctgtttctggtggccgctgccacaagagtgcacagccagatctatgagggcaagctgaccgccgagggcctgagatttggaatcgtggccagccggttcaatcacgccctggtggatagactggtggaaggcgccatcgatgccattgtcagacacggcggcagagaagaggacatcaccctcgttagagtgcccggctcttgggagattcctgtggctgctggcgagctggcccggaaagaagatatcgacgccgttatcgccatcggcgtgctgatcagaggcgccacacctcacttcgactatatcgccagcgaggtgtccaaaggcctggccgatctgagcctggaactgagaaagcccatcaccttcggcgtgatcaccgctgacacactggaacaggccattgagagagccggcaccaagcacggcaacaaaggatgggaagccgctctgtccgccatcgagatggccaacctgttcaagagcctgagaggcggctctggtggttctggcggatcaggtggaagtggcggaggatttgcctgcaagaccgccaacggaaccgccattcctatcggaggcggaagcgccaatgtgtatgtgaatctggcccctgtggtcaacgtgggccagaacctggtggtggatctgagcacccagatcttttgccacaacgactaccccgagacaatcaccgactacgtgaccctgcagagaggctctgcttacggcggagtgctgagcaatttcagcggcaccgtgaagtacagcggcagcagctacccatttcctaccaccagcgagacacccagagtggtgtacaacagcagaaccgacaagccctggcctgtggctctgtacctgacacctgttagctctgctggcggcgtggcaatcaaagccggatctctgatcgctgtgctgatcctgcggcagaccaacaactacaacagcgacgacttccagttcgtgtggaacatctacgccaacaacgacgtggtggtgcctacaggcggctgtgatgtgtctgccagagatgtgaccgtgacactgcctgactaccctggcagcgtgccaattcctctgaccgtgtactgtgccaagagccagaatctgggctactacctgagcggcacaacagccgatgccggcaacagcatcttcaccaacaccgccagcttcagccctgctcaaggtgttggagtgcagctgacccggaacggcacaatcatccccgccaacaataccgtgtctctgggcgctgttggcaccagcgctgtttctctgggactgaccgccaattacgccagaacaggcggacaagtgacagccggcaatgtgcagagcatcatcggagtgaccttcgtgtaccagcctggcgacggaaatgccgacgtgaccatcaccgtgaacggaaaggtggtggccaagtga

SEQ ID NO: 613 - RNA, 1422 nt, synthetic construct
  misc_feature 1..1422: note Artificial____HsIgE(1-18)_Ec(J96)-FimH(22-300_N28S_N91S_N24 9Q)_Linker-PGDGN_Ec(J96)-FimG(24-37)_Linker-SGG_LumSynth(1- 154_C37A_N102D) CDS opt3
  source 1..1422: mol_type = other RNA
atggactggacctggatcctgtttctggtggccgctgccacaagagtgcacagctttgcctgtaaaaccgccagcggcaccgccattcctatcggcggaggatctgccaatgtgtatgtgaatctggcccctgtggtcaacgtgggccagaacctggtggtggatctgagcacccagatcttttgccacaacgactaccccgagacaatcaccgactacgtgaccctgcagagaggctctgcttacggcggagtgctgagcagcttttccggcaccgtgaagtacagcggcagcagctacccatttcctaccaccagcgagacacccagagtggtgtacaacagcagaaccgacaagccctggcctgtggctctgtacctgacacctgttagctctgctggcggcgtggccattaaggccggatctctgattgccgtgctgatcctgcggcagaccaacaactacaacagcgacgacttccagttcgtgtggaacatctacgccaacaacgacgtggtggtgcctacaggcggctgtgatgtgtctgccagagatgtgaccgtgacactgcctgactaccctggcagcgtgccaattcctctgaccgtgtactgtgccaagagccagaatctgggctactacctgagcggcacaacagccgatgccggcaacagcatcttcaccaacaccgccagcttcagccctgctcaaggtgttggagtgcagctgaccagacagggcacaatcatccccgccaacaataccgtgtctctgggcgctgttggcaccagcgctgtttctctgggactgaccgccaactacgccagaacaggcggacaagtgacagccggcaatgtgcagtctatcatcggcgtgaccttcgtgtaccagcctggcgacggaaatgccgacgtgaccatcaccgtgaacggaaaggtggtggccaagtctggcggcatgcagatctatgagggcaagctgaccgccgagggcctgagatttggaatcgtggccagccggttcaatcacgccctggtggatagactggtggaaggcgccatcgatgccattgtcagacacggcggcagagaagaggacatcaccctcgttagagtgcccggctcttgggagattcctgtggctgctggcgaactggcccggaaagaggatatcgacgccgttatcgccatcggggtgctgatcagaggcgccacacctcacttcgactatatcgccagcgaggtgtccaaaggcctggccgatctgagcctggaactgagaaagcccatcaccttcggcgtgatcaccgctgacacactggaacaggccattgagagagccggcaccaagcacggaaacaaaggatgggaagccgctctgtccgccatcgagatggccaacctgttcaagagcctgcggtga

SEQ ID NO: 614 - RNA, 1422 nt, synthetic construct
  misc_feature 1..1422: note Artificial____HsIgE(1-18)_Ec(J96)-FimH(22-300_N28S_N91S_N24 9Q_N256D)_Linker-PGDGN_Ec(J96)-FimG(24-37)_Linker-SGG_LumSy nth(1-154_C37A_N102D) CDS opt3
  source 1..1422: mol_type = other RNA
atggactggacctggatcctgtttctggtggccgctgccacaagagtgcacagctttgcctgtaaaaccgccagcggcaccgccattcctatcggcggaggatctgccaatgtgtatgtgaatctggcccctgtggtcaacgtgggccagaacctggtggtggatctgagcacccagatcttttgccacaacgactaccccgagacaatcaccgactacgtgaccctgcagagaggctctgcttacggcggagtgctgagcagcttttccggcaccgtgaagtacagcggcagcagctacccatttcctaccaccagcgagacacccagagtggtgtacaacagcagaaccgacaagccctggcctgtggctctgtacctgacacctgttagctctgctggcggcgtggccattaaggccggatctctgattgccgtgctgatcctgcggcagaccaacaactacaacagcgacgacttccagttcgtgtggaacatctacgccaacaacgacgtggtggtgcctacaggcggctgtgatgtgtctgccagagatgtgaccgtgacactgcctgactaccctggcagcgtgccaattcctctgaccgtgtactgtgccaagagccagaatctgggctactacctgagcggcacaacagccgatgccggcaacagcatcttcaccaacaccgccagcttcagccctgctcaaggtgttggagtgcagctgaccagacagggcacaatcatccccgccgacaacacagtgtctctgggagctgttggcaccagcgccgtttctctgggactgacagccaactacgccagaacaggcggacaagtgacagccggcaatgtgcagtctatcatcggcgtgaccttcgtgtaccagcctggcgacggaaatgccgacgtgaccatcaccgtgaacggaaaggtggtggccaagtctggcggcatgcagatctatgagggcaagctgaccgccgagggcctgagatttggaatcgtggccagccggttcaatcacgccctggtggatagactggtggaaggcgccatcgatgccattgtcagacacggcggcagagaagaggacatcaccctcgttagagtgcccggctcttgggagattcctgtggctgctggcgaactggcccggaaagaggatatcgacgccgttatcgccatcggggtgctgatcagaggcgccacacctcacttcgactatatcgccagcgaggtgtccaaaggcctggccgatctgagcctggaactgagaaagcccatcaccttcggcgtgatcaccgctgacacactggaacaggccattgagagagccggcaccaagcacggaaacaaaggatgggaagccgctctgtccgccatcgagatggccaacctgttcaagagcctgcggtga

SEQ ID NO: 615 - RNA, 1422 nt, synthetic construct
  misc_feature 1..1422: note Artificial____HsIgE(1-18)_Ec(J96)-FimH(22-300_N28S_V48C_L55 C_N91S_N249Q)_Linker-PGDGN_Ec(J96)-FimG(24-37)_Linker-SGG_L umSynth(1-154_C37A_N102D) CDS opt3
  source 1..1422: mol_type = other RNA
atggactggacctggatcctgtttctggtggccgctgccacaagagtgcacagctttgcctgtaaaaccgccagcggcaccgccattcctatcggcggaggatctgccaatgtgtatgtgaatctggccccttgcgtgaacgtgggccagaactgtgtggtggacctgagcacccagatcttttgccacaacgactaccccgagacaatcaccgactacgtgaccctgcagagaggctctgcttacggcggagtgctgagcagcttttccggcaccgtgaagtacagcggcagcagctacccatttcctaccaccagcgagacacccagagtggtgtacaacagcagaaccgacaagccctggcctgtggctctgtacctgacacctgttagctctgctggcggcgtggccattaaggccggatctctgattgccgtgctgatcctgcggcagaccaacaactacaacagcgacgacttccagttcgtgtggaacatctacgccaacaacgacgtggtggtgcctacaggcggctgtgatgtgtctgccagagatgtgaccgtgacactgcctgactaccctggcagcgtgccaattcctctgaccgtgtactgtgccaagagccagaacctgggctactacctgtctggcacaacagccgatgccggcaacagcatcttcaccaacaccgccagcttcagccctgctcaaggtgttggagtgcagctgaccagacagggcacaatcatccccgccaacaataccgtgtctctgggcgctgttggcaccagcgctgtttctctgggactgaccgccaactacgccagaacaggcggacaagtgacagccggcaatgtgcagtctatcatcggcgtgaccttcgtgtaccagcctggcgacggaaatgccgacgtgaccatcaccgtgaacggaaaggtggtggccaagtctggcggcatgcagatctatgagggcaagctgaccgccgagggcctgagatttggaatcgtggccagccggttcaatcacgccctggtggatagactggtggaaggcgccatcgatgccattgtcagacacggcggcagagaagaggacatcaccctcgttagagtgcccggctcttgggagattcctgtggctgctggcgaactggcccggaaagaggatatcgacgccgttatcgccatcggggtgctgatcagaggcgccacacctcacttcgactatatcgccagcgaggtgtccaaaggcctggccgatctgagcctggaactgagaaagcccatcaccttcggcgtgatcaccgctgacacactggaacaggccattgagagagccggcaccaagcacggaaacaaaggatgggaagccgctctgtccgccatcgagatggccaacctgttcaagagcctgcggtga

SEQ ID NO: 616 - RNA, 1422 nt, synthetic construct
  misc_feature 1..1422: note Artificial____HsIgE(1-18)_Ec(J96)-FimH(22-300_F165V)_Linker -PGDGN_Ec(J96)-FimG(24-37)_Linker-SGG_LumSynth(1-154_C37A_N 102D) CDS opt3
  source 1..1422: mol_type = other RNA
atggactggacctggatcctgtttctggtggccgctgccacaagagtgcacagctttgcctgcaagaccgccaacggcaccgccattcctattggcggaggatccgccaatgtgtatgtgaatctggcccctgtggtcaacgtgggccagaacctggtggtggatctgagcacccagatcttttgccacaacgactaccccgagacaatcaccgactacgtgaccctgcagagaggctctgcttacggcggcgtgctgagcaatttttccggcaccgtgaagtacagcggcagcagctacccatttcctaccaccagcgagacacccagagtggtgtacaacagcagaaccgacaagccctggcctgtggctctgtacctgacacctgttagctctgctggcggcgtggccattaaggccggatctctgattgccgtgctgatcctgcggcagaccaacaactacaacagcgacgacttccaggtcgtgtggaacatctacgccaacaacgacgtggtggtgcctacaggcggctgtgatgtgtctgccagagatgtgaccgtgacactgcctgactaccctggcagcgtgccaattcctctgaccgtgtactgtgccaagagccagaatctgggctactacctgagcggcacaacagccgatgccggcaacagcatcttcaccaacaccgccagcttcagccctgctcaaggtgttggagtgcagctgacccggaacggcacaatcatccccgccaacaataccgtgtctctgggcgctgttggcaccagcgctgtttctctgggactgaccgccaattacgccagaacaggcggacaagtgaccgccggcaatgtgcagtctatcatcggcgtgaccttcgtgtaccagcctggcgacggaaatgccgacgtgaccatcaccgtgaacggaaaggtggtggccaagtctggcggcatgcagatctatgagggcaagctgacagccgagggcctgagatttggaatcgtggccagccggttcaatcacgccctggtggatagactggtggaaggcgccatcgatgccattgtcagacacggcggcagagaagaggacatcaccctcgttagagtgcccggctcttgggagattcctgtggctgctggcgaactggcccggaaagaggatatcgacgccgttatcgccatcggagtgctgatcagaggcgccacacctcacttcgactatatcgccagcgaggtgtccaaaggcctggccgatctgagcctggaactgagaaagcccatcaccttcggcgtgatcaccgctgacacactggaacaggccattgagagagccggcaccaagcacggaaacaaaggatgggaagccgctctgtccgccatcgagatggccaacctgttcaagagcctgcggtga

SEQ ID NO: 617 - RNA, 1449 nt, synthetic construct
  misc_feature 1..1449: note Artificial____HsIgE(1-18)_Ec(J96)-FimH(22-300_N28S_N91S_N24 9Q)_Linker-PGDGN_Ec(J96)-FimG(24-37)_Linker-SGG_Ferritin(5- 167_N19Q) CDS opt3
  source 1..1449: mol_type = other RNA
atggactggacctggatcctgtttctggtggccgctgccacaagagtgcacagctttgcctgtaaaaccgccagcggcaccgccattcctatcggcggaggatctgccaatgtgtatgtgaatctggcccctgtggtcaacgtgggccagaacctggtggtggatctgagcacccagatcttttgccacaacgactaccccgagacaatcaccgactacgtgaccctgcagagaggctctgcttacggcggagtgctgagcagcttttccggcaccgtgaagtacagcggcagcagctacccatttcctaccaccagcgagacacccagagtggtgtacaacagcagaaccgacaagccctggcctgtggctctgtacctgacacctgttagctctgctggcggcgtggccattaaggccggatctctgattgccgtgctgatcctgcggcagaccaacaactacaacagcgacgacttccagttcgtgtggaacatctacgccaacaacgacgtggtggtgcctacaggcggctgtgatgtgtctgccagagatgtgaccgtgacactgcctgactaccctggcagcgtgccaattcctctgaccgtgtactgtgccaagagccagaatctgggctactacctgagcggcacaacagccgatgccggcaacagcatcttcaccaacaccgccagcttcagccctgctcaaggtgttggagtgcagctgaccagacagggcacaatcatccccgccaacaataccgtgtctctgggcgctgttggcaccagcgctgtttctctgggactgaccgccaactacgccagaacaggcggacaagtgacagccggcaatgtgcagtctatcatcggcgtgaccttcgtgtaccagcctggcgacggaaatgccgacgtgaccatcaccgtgaacggaaaggtggtggccaagtctggcggcgacatcatcaagctgctgaacgagcaagtgaacaaagagatgcagagcagcaacctgtacatgagcatgagcagctggtgctacacccacagccttgatggcgccggactgttcctgtttgatcacgccgccgaggaatacgagcacgccaagaagctgatcatcttcctgaacgagaacaacgtgcccgtccagctgacctctatctctgcccctgagcacaagttcgagggcctgacacagatcttccagaaggcctacgaacacgagcagcacatcagcgagagcatcaacaacatcgtggaccacgccattaagagcaaggatcacgccaccttcaactttctgcagtggtacgtggccgaacagcacgaggaagaggtgctgttcaaggacatcctggacaagatcgagctgatcggcaacgagaaccacggcctgtatctggccgaccagtacgtgaagggaatcgccaagtccagaaagagctga

SEQ ID NO: 618 - RNA, 1449 nt, synthetic construct
  misc_feature 1..1449: note Artificial____HsIgE(1-18)_Ec(J96)-FimH(22-300_N28S_N91S_N24 9Q_N256D)_Linker-PGDGN_Ec(J96)-FimG(24-37)_Linker-SGG_Ferri tin(5-167_N19Q) CDS opt3
  source 1..1449: mol_type = other RNA
atggactggacctggatcctgtttctggtggccgctgccacaagagtgcacagctttgcctgtaaaaccgccagcggcaccgccattcctatcggcggaggatctgccaatgtgtatgtgaatctggcccctgtggtcaacgtgggccagaacctggtggtggatctgagcacccagatcttttgccacaacgactaccccgagacaatcaccgactacgtgaccctgcagagaggctctgcttacggcggagtgctgagcagcttttccggcaccgtgaagtacagcggcagcagctacccatttcctaccaccagcgagacacccagagtggtgtacaacagcagaaccgacaagccctggcctgtggctctgtacctgacacctgttagctctgctggcggcgtggccattaaggccggatctctgattgccgtgctgatcctgcggcagaccaacaactacaacagcgacgacttccagttcgtgtggaacatctacgccaacaacgacgtggtggtgcctacaggcggctgtgatgtgtctgccagagatgtgaccgtgacactgcctgactaccctggcagcgtgccaattcctctgaccgtgtactgtgccaagagccagaatctgggctactacctgagcggcacaacagccgatgccggcaacagcatcttcaccaacaccgccagcttcagccctgctcaaggtgttggagtgcagctgaccagacagggcacaatcatccccgccgacaacacagtgtctctgggagctgttggcaccagcgccgtttctctgggactgacagccaactacgccagaacaggcggacaagtgacagccggcaatgtgcagtctatcatcggcgtgaccttcgtgtaccagcctggcgacggaaatgccgacgtgaccatcaccgtgaacggaaaggtggtggccaagtctggcggcgacatcatcaagctgctgaacgagcaagtgaacaaagagatgcagagcagcaacctgtacatgagcatgagcagctggtgctacacccacagccttgatggcgccggactgttcctgtttgatcacgccgccgaggaatacgagcacgccaagaagctgatcatcttcctgaacgagaacaacgtgcccgtccagctgacctctatctctgcccctgagcacaagttcgagggcctgacacagatcttccagaaggcctacgaacacgagcagcacatcagcgagagcatcaacaacatcgtggaccacgccattaagagcaaggatcacgccaccttcaactttctgcagtggtacgtggccgaacagcacgaggaagaggtgctgttcaaggacatcctggacaagatcgagctgatcggcaacgagaaccacggcctgtatctggccgaccagtacgtgaagggaatcgccaagtccagaaagagctga

SEQ ID NO: 619 - RNA, 1449 nt, synthetic construct
  misc_feature 1..1449: note Artificial____HsIgE(1-18)_Ec(J96)-FimH(22-300_N28S_V48C_L55 C_N91S_N249Q)_Linker-PGDGN_Ec(J96)-FimG(24-37)_Linker-SGG_F erritin(5-167_N19Q) CDS opt3
  source 1..1449: mol_type = other RNA
atggactggacctggatcctgtttctggtggccgctgccacaagagtgcacagctttgcctgtaaaaccgccagcggcaccgccattcctatcggcggaggatctgccaatgtgtatgtgaatctggccccttgcgtgaacgtgggccagaactgtgtggtggacctgagcacccagatcttttgccacaacgactaccccgagacaatcaccgactacgtgaccctgcagagaggctctgcttacggcggagtgctgagcagcttttccggcaccgtgaagtacagcggcagcagctacccatttcctaccaccagcgagacacccagagtggtgtacaacagcagaaccgacaagccctggcctgtggctctgtacctgacacctgttagctctgctggcggcgtggccattaaggccggatctctgattgccgtgctgatcctgcggcagaccaacaactacaacagcgacgacttccagttcgtgtggaacatctacgccaacaacgacgtggtggtgcctacaggcggctgtgatgtgtctgccagagatgtgaccgtgacactgcctgactaccctggcagcgtgccaattcctctgaccgtgtactgtgccaagagccagaacctgggctactacctgtctggcacaacagccgatgccggcaacagcatcttcaccaacaccgccagcttcagccctgctcaaggtgttggagtgcagctgaccagacagggcacaatcatccccgccaacaataccgtgtctctgggcgctgttggcaccagcgctgtttctctgggactgaccgccaactacgccagaacaggcggacaagtgacagccggcaatgtgcagtctatcatcggcgtgaccttcgtgtaccagcctggcgacggaaatgccgacgtgaccatcaccgtgaacggaaaggtggtggccaagtctggcggcgacatcatcaagctgctgaacgagcaagtgaacaaagagatgcagagcagcaacctgtacatgagcatgagcagctggtgctacacccacagccttgatggcgccggactgttcctgtttgatcacgccgccgaggaatacgagcacgccaagaagctgatcatcttcctgaacgagaacaacgtgcccgtccagctgacctctatctctgcccctgagcacaagttcgagggcctgacacagatcttccagaaggcctacgaacacgagcagcacatcagcgagagcatcaacaacatcgtggaccacgccattaagagcaaggatcacgccaccttcaactttctgcagtggtacgtggccgaacagcacgaggaagaggtgctgttcaaggacatcctggacaagatcgagctgatcggcaacgagaaccacggcctgtatctggccgaccagtacgtgaagggaatcgccaagtccagaaagagctga

SEQ ID NO: 620 - RNA, 1449 nt, synthetic construct
  misc_feature 1..1449: note Artificial____HsIgE(1-18)_Ec(J96)-FimH(22-300_F165V)_Linker -PGDGN_Ec(J96)-FimG(24-37)_Linker-SGG_Ferritin(5-167_N19Q) CDS opt3
  source 1..1449: mol_type = other RNA
atggactggacctggatcctgtttctggtggccgctgccacaagagtgcacagctttgcctgcaagaccgccaacggcaccgccattcctattggcggaggatccgccaatgtgtatgtgaatctggcccctgtggtcaacgtgggccagaacctggtggtggatctgagcacccagatcttttgccacaacgactaccccgagacaatcaccgactacgtgaccctgcagagaggctctgcttacggcggcgtgctgagcaatttttccggcaccgtgaagtacagcggcagcagctacccatttcctaccaccagcgagacacccagagtggtgtacaacagcagaaccgacaagccctggcctgtggctctgtacctgacacctgttagctctgctggcggcgtggccattaaggccggatctctgattgccgtgctgatcctgcggcagaccaacaactacaacagcgacgacttccaggtcgtgtggaacatctacgccaacaacgacgtggtggtgcctacaggcggctgtgatgtgtctgccagagatgtgaccgtgacactgcctgactaccctggcagcgtgccaattcctctgaccgtgtactgtgccaagagccagaatctgggctactacctgagcggcacaacagccgatgccggcaacagcatcttcaccaacaccgccagcttcagccctgctcaaggtgttggagtgcagctgacccggaacggcacaatcatccccgccaacaataccgtgtctctgggcgctgttggcaccagcgctgtttctctgggactgaccgccaattacgccagaacaggcggacaagtgaccgccggcaatgtgcagtctatcatcggcgtgaccttcgtgtaccagcctggcgacggaaatgccgacgtgaccatcaccgtgaacggaaaggtggtggccaagtctggcggcgacatcatcaagctgctgaacgagcaagtgaacaaagagatgcagagcagcaacctgtacatgagcatgagcagctggtgctacacccacagccttgatggcgccggactgttcctgtttgaccatgccgccgaggaatacgagcacgccaagaagctgatcatcttcctgaacgagaacaacgtgcccgtccagctgaccagcatttctgcccctgagcacaagttcgagggcctgacacagatcttccagaaggcctacgaacacgagcagcacatcagcgagagcatcaacaacatcgtggaccacgccattaagagcaaggatcacgccaccttcaactttctgcagtggtacgtggccgaacagcacgaggaagaggtgctgttcaaggacatcctggacaagatcgagctgatcggcaacgagaaccacggcctgtatctggccgaccagtacgtgaagggaatcgccaagtccagaaagagctga

SEQ ID NO: 621 - RNA, 726 nt, synthetic construct; identical to SEQ ID NO: 322
  misc_feature 1..726: note Artificial____Ec(J96)-FimC(1-36)_Ec(J96)-FimC(37-241) CDS opt4
  source 1..726: mol_type = other RNA

SEQ ID NO: 622 - RNA, 672 nt, synthetic construct
  misc_feature 1..672: note = Artificial____HsIgE(1-18)_Ec(J96)-FimC(37-241) CDS opt4
  source 1..672: mol_type = other RNA
atggactggacctggatcctgttcctggtggccgccgccaccagagtgcacagcggcgtggccctgggcgccaccagagtgatctaccccgccggccagaagcaggtgcagctggccgtgaccaacaacgacgagaacagcacctacctgatccagagctgggtggagaacgccgacggcgtgaaggacggcagattcatcgtgaccccccccctgttcgccatgaagggcaagaaggagaacaccctgagaatcctggacgccaccaacaaccagctgccccaggacagagagagcctgttctggatgaacgtgaaggccatccccagcatggacaagagcaagctgaccgagaacaccctgcagctggccatcatcagcagaatcaagctgtactacagacccgccaagctggccctgccccccgaccaggccgccgagaagctgagattcagaagaagcgccaacagcctgaccctgatcaaccccaccccctactacctgaccgtgaccgagctgaacgccggcaccagagtgctggagaacgccctggtgccccccatgggcgagagcaccgtgaagctgcccagcgacgccggcagcaacatcacctacagaaccatcaacgactacggcgccctgacccccaagatgaccggcgtgatggagtga

SEQ ID NO: 623 - RNA, 903 nt, synthetic construct; identical to SEQ ID NO: 227
  misc_feature 1..903: note Artificial____Ec(J96)-FimH(1-21)_Ec(J96)-FimH(22-300) CDS opt4
  source 1..903: mol_type = other RNA

SEQ ID NO: 624 - RNA, 894 nt, synthetic construct
  misc_feature 1..894: note = Artificial____HsIgE(1-18)_Ec(J96)-FimH(22-300) CDS opt4
  source 1..894: mol_type = other RNA
atggactggacctggatcctgttcctggtggccgccgccaccagagtgcacagcttcgcctgcaagaccgccaacggcaccgccatccccatcggcggcggcagcgccaacgtgtacgtgaacctggcccccgtggtgaacgtgggccagaacctggtggtggacctgagcacccagatcttctgccacaacgactaccccgagaccatcaccgactacgtgaccctgcagagaggcagcgcctacggcggcgtgctgagcaacttcagcggcaccgtgaagtacagcggcagcagctaccccttccccaccaccagcgagacccccagagtggtgtacaacagcagaaccgacaagccctggcccgtggccctgtacctgacccccgtgagcagcgccggcggcgtggccatcaaggccggcagcctgatcgccgtgctgatcctgagacagaccaacaactacaacagcgacgacttccagttcgtgtggaacatctacgccaacaacgacgtggtggtgcccaccggcggctgcgacgtgagcgccagagacgtgaccgtgaccctgcccgactaccccggcagcgtgcccatccccctgaccgtgtactgcgccaagagccagaacctgggctactacctgagcggcaccaccgccgacgccggcaacagcatcttcaccaacaccgccagcttcagccccgcccagggcgtgggcgtgcagctgaccagaaacggcaccatcatccccgccaacaacaccgtgagcctgggcgccgtgggcaccagcgccgtgagcctgggcctgaccgccaactacgccagaaccggcggccaggtgaccgccggcaacgtgcagagcatcatcggcgtgaccttcgtgtaccagtga

SEQ ID NO: 625 - RNA, 900 nt, synthetic construct
  misc_feature 1..900: note = Artificial____MmIgK(1-20)_Ec(J96)-FimH(22-300) CDS opt4
  source 1..900: mol_type = other RNA
atggagaccgacaccctgctgctgtgggtgctgctgctgtgggtgcccggcagcaccggcttcgcctgcaagaccgccaacggcaccgccatccccatcggcggcggcagcgccaacgtgtacgtgaacctggcccccgtggtgaacgtgggccagaacctggtggtggacctgagcacccagatcttctgccacaacgactaccccgagaccatcaccgactacgtgaccctgcagagaggcagcgcctacggcggcgtgctgagcaacttcagcggcaccgtgaagtacagcggcagcagctaccccttccccaccaccagcgagacccccagagtggtgtacaacagcagaaccgacaagccctggcccgtggccctgtacctgacccccgtgagcagcgccggcggcgtggccatcaaggccggcagcctgatcgccgtgctgatcctgagacagaccaacaactacaacagcgacgacttccagttcgtgtggaacatctacgccaacaacgacgtggtggtgcccaccggcggctgcgacgtgagcgccagagacgtgaccgtgaccctgcccgactaccccggcagcgtgcccatccccctgaccgtgtactgcgccaagagccagaacctgggctactacctgagcggcaccaccgccgacgccggcaacagcatcttcaccaacaccgccagcttcagccccgcccagggcgtgggcgtgcagctgaccagaaacggcaccatcatccccgccaacaacaccgtgagcctgggcgccgtgggcaccagcgccgtgagcctgggcctgaccgccaactacgccagaaccggcggccaggtgaccgccggcaacgtgcagagcatcatcggcgtgaccttcgtgtaccagtga

SEQ ID NO: 626 - RNA, 960 nt, synthetic construct
  misc_feature 1..960: note Artificial____Ec(J96)-FimH(1-21)_Ec(J96)-FimH(22-300)_Linke r-PGDGN_Ec(J96)-FimG(24-37) CDS opt4
  source 1..960: mol_type = other RNA
atgaagagagtgatcaccctgttcgccgtgctgctgatgggctggagcgtgaacgcctggagcttcgcctgcaagaccgccaacggcaccgccatccccatcggcggcggcagcgccaacgtgtacgtgaacctggcccccgtggtgaacgtgggccagaacctggtggtggacctgagcacccagatcttctgccacaacgactaccccgagaccatcaccgactacgtgaccctgcagagaggcagcgcctacggcggcgtgctgagcaacttcagcggcaccgtgaagtacagcggcagcagctaccccttccccaccaccagcgagacccccagagtggtgtacaacagcagaaccgacaagccctggcccgtggccctgtacctgacccccgtgagcagcgccggcggcgtggccatcaaggccggcagcctgatcgccgtgctgatcctgagacagaccaacaactacaacagcgacgacttccagttcgtgtggaacatctacgccaacaacgacgtggtggtgcccaccggcggctgcgacgtgagcgccagagacgtgaccgtgaccctgcccgactaccccggcagcgtgcccatccccctgaccgtgtactgcgccaagagccagaacctgggctactacctgagcggcaccaccgccgacgccggcaacagcatcttcaccaacaccgccagcttcagccccgcccagggcgtgggcgtgcagctgaccagaaacggcaccatcatccccgccaacaacaccgtgagcctgggcgccgtgggcaccagcgccgtgagcctgggcctgaccgccaactacgccagaaccggcggccaggtgaccgccggcaacgtgcagagcatcatcggcgtgaccttcgtgtaccagcccggcgacggcaacgccgacgtgaccatcaccgtgaacggcaaggtggtggccaagtga

SEQ ID NO: 627 - RNA, 951 nt, synthetic construct
  misc_feature 1..951: note Artificial____HsIgE(1-18)_Ec(J96)-FimH(22-300)_Linker-PGDGN _Ec(J96)-FimG(24-37) CDS opt4
  source 1..951: mol_type = other RNA
atggactggacctggatcctgttcctggtggccgccgccaccagagtgcacagcttcgcctgcaagaccgccaacggcaccgccatccccatcggcggcggcagcgccaacgtgtacgtgaacctggcccccgtggtgaacgtgggccagaacctggtggtggacctgagcacccagatcttctgccacaacgactaccccgagaccatcaccgactacgtgaccctgcagagaggcagcgcctacggcggcgtgctgagcaacttcagcggcaccgtgaagtacagcggcagcagctaccccttccccaccaccagcgagacccccagagtggtgtacaacagcagaaccgacaagccctggcccgtggccctgtacctgacccccgtgagcagcgccggcggcgtggccatcaaggccggcagcctgatcgccgtgctgatcctgagacagaccaacaactacaacagcgacgacttccagttcgtgtggaacatctacgccaacaacgacgtggtggtgcccaccggcggctgcgacgtgagcgccagagacgtgaccgtgaccctgcccgactaccccggcagcgtgcccatccccctgaccgtgtactgcgccaagagccagaacctgggctactacctgagcggcaccaccgccgacgccggcaacagcatcttcaccaacaccgccagcttcagccccgcccagggcgtgggcgtgcagctgaccagaaacggcaccatcatccccgccaacaacaccgtgagcctgggcgccgtgggcaccagcgccgtgagcctgggcctgaccgccaactacgccagaaccggcggccaggtgaccgccggcaacgtgcagagcatcatcggcgtgaccttcgtgtaccagcccggcgacggcaacgccgacgtgaccatcaccgtgaacggcaaggtggtggccaagtga

SEQ ID NO: 628 - RNA, 957 nt, synthetic construct
  misc_feature 1..957: note Artificial____HsIgE(1-18)_Ec(J96)-FimH(22-300)_Linker-G4SGG _Ec(J96)-FimG(24-37) CDS opt4
  source 1..957: mol_type = other RNA
atggactggacctggatcctgttcctggtggccgccgccaccagagtgcacagcttcgcctgcaagaccgccaacggcaccgccatccccatcggcggcggcagcgccaacgtgtacgtgaacctggcccccgtggtgaacgtgggccagaacctggtggtggacctgagcacccagatcttctgccacaacgactaccccgagaccatcaccgactacgtgaccctgcagagaggcagcgcctacggcggcgtgctgagcaacttcagcggcaccgtgaagtacagcggcagcagctaccccttccccaccaccagcgagacccccagagtggtgtacaacagcagaaccgacaagccctggcccgtggccctgtacctgacccccgtgagcagcgccggcggcgtggccatcaaggccggcagcctgatcgccgtgctgatcctgagacagaccaacaactacaacagcgacgacttccagttcgtgtggaacatctacgccaacaacgacgtggtggtgcccaccggcggctgcgacgtgagcgccagagacgtgaccgtgaccctgcccgactaccccggcagcgtgcccatccccctgaccgtgtactgcgccaagagccagaacctgggctactacctgagcggcaccaccgccgacgccggcaacagcatcttcaccaacaccgccagcttcagccccgcccagggcgtgggcgtgcagctgaccagaaacggcaccatcatccccgccaacaacaccgtgagcctgggcgccgtgggcaccagcgccgtgagcctgggcctgaccgccaactacgccagaaccggcggccaggtgaccgccggcaacgtgcagagcatcatcggcgtgaccttcgtgtaccagggcggcggcggcagcggcggcgccgacgtgaccatcaccgtgaacggcaaggtggtggccaagtga

SEQ ID NO: 629 - RNA, 957 nt, synthetic construct
  misc_feature 1..957: note Artificial____MmIgK(1-20)_Ec(J96)-FimH(22-300)_Linker-PGDGN _Ec(J96)-FimG(24-37) CDS opt4
  source 1..957: mol_type = other RNA
atggagaccgacaccctgctgctgtgggtgctgctgctgtgggtgcccggcagcaccggcttcgcctgcaagaccgccaacggcaccgccatccccatcggcggcggcagcgccaacgtgtacgtgaacctggcccccgtggtgaacgtgggccagaacctggtggtggacctgagcacccagatcttctgccacaacgactaccccgagaccatcaccgactacgtgaccctgcagagaggcagcgcctacggcggcgtgctgagcaacttcagcggcaccgtgaagtacagcggcagcagctaccccttccccaccaccagcgagacccccagagtggtgtacaacagcagaaccgacaagccctggcccgtggccctgtacctgacccccgtgagcagcgccggcggcgtggccatcaaggccggcagcctgatcgccgtgctgatcctgagacagaccaacaactacaacagcgacgacttccagttcgtgtggaacatctacgccaacaacgacgtggtggtgcccaccggcggctgcgacgtgagcgccagagacgtgaccgtgaccctgcccgactaccccggcagcgtgcccatccccctgaccgtgtactgcgccaagagccagaacctgggctactacctgagcggcaccaccgccgacgccggcaacagcatcttcaccaacaccgccagcttcagccccgcccagggcgtgggcgtgcagctgaccagaaacggcaccatcatccccgccaacaacaccgtgagcctgggcgccgtgggcaccagcgccgtgagcctgggcctgaccgccaactacgccagaaccggcggccaggtgaccgccggcaacgtgcagagcatcatcggcgtgaccttcgtgtaccagcccggcgacggcaacgccgacgtgaccatcaccgtgaacggcaaggtggtggccaagtga

SEQ ID NO: 630 - RNA, 957 nt, synthetic construct
  misc_feature 1..957: note Artificial____MmIgK(1-20)_Ec(536)-FimH(22-300)_Linker-PGDGN _Ec(J96)-FimG(24-37) CDS opt4
  source 1..957: mol_type = other RNA
atggagaccgacaccctgctgctgtgggtgctgctgctgtgggtgcccggcagcaccggcttcgcctgcaagaccgccaacggcaccgccatccccatcggcggcggcagcgccaacgtgtacgtgaacctggcccccgccgtgaacgtgggccagaacctggtggtggacctgagcacccagatcttctgccacaacgactaccccgagaccatcaccgactacgtgaccctgcagagaggcagcgcctacggcggcgtgctgagcagcttcagcggcaccgtgaagtacaacggcagcagctaccccttccccaccaccagcgagacccccagagtggtgtacaacagcagaaccgacaagccctggcccgtggccctgtacctgacccccgtgagcagcgccggcggcgtggccatcaaggccggcagcctgatcgccgtgctgatcctgagacagaccaacaactacaacagcgacgacttccagttcgtgtggaacatctacgccaacaacgacgtggtggtgcccaccggcggctgcgacgtgagcgccagagacgtgaccgtgaccctgcccgactaccccggcagcgtgcccatccccctgaccgtgtactgcgccaagagccagaacctgggctactacctgagcggcaccaccgccgacgccggcaacagcatcttcaccaacaccgccagcttcagccccgcccagggcgtgggcgtgcagctgaccagaaacggcaccatcatccccgccaacaacaccgtgagcctgggcgccgtgggcaccagcgccgtgagcctgggcctgaccgccaactacgccagaaccggcggccaggtgaccgccggcaacgtgcagagcatcatcggcgtgaccttcgtgtaccagcccggcgacggcaacgccgacgtgaccatcaccgtgaacggcaaggtggtggccaagtga

SEQ ID NO: 631 - RNA, 981 nt, synthetic construct
  misc_feature 1..981: note Artificial____HsIgE(1-18)_Ec(J96)-FimH(22-300)_Linker-(G4S) 3_Ec(J96)-FimC(135-148) CDS opt4
  source 1..981: mol_type = other RNA
atggactggacctggatcctgttcctggtggccgccgccaccagagtgcacagcttcgcctgcaagaccgccaacggcaccgccatccccatcggcggcggcagcgccaacgtgtacgtgaacctggcccccgtggtgaacgtgggccagaacctggtggtggacctgagcacccagatcttctgccacaacgactaccccgagaccatcaccgactacgtgaccctgcagagaggcagcgcctacggcggcgtgctgagcaacttcagcggcaccgtgaagtacagcggcagcagctaccccttccccaccaccagcgagacccccagagtggtgtacaacagcagaaccgacaagccctggcccgtggccctgtacctgacccccgtgagcagcgccggcggcgtggccatcaaggccggcagcctgatcgccgtgctgatcctgagacagaccaacaactacaacagcgacgacttccagttcgtgtggaacatctacgccaacaacgacgtggtggtgcccaccggcggctgcgacgtgagcgccagagacgtgaccgtgaccctgcccgactaccccggcagcgtgcccatccccctgaccgtgtactgcgccaagagccagaacctgggctactacctgagcggcaccaccgccgacgccggcaacagcatcttcaccaacaccgccagcttcagccccgcccagggcgtgggcgtgcagctgaccagaaacggcaccatcatccccgccaacaacaccgtgagcctgggcgccgtgggcaccagcgccgtgagcctgggcctgaccgccaactacgccagaaccggcggccaggtgaccgccggcaacgtgcagagcatcatcggcgtgaccttcgtgtaccagggcggcggcggcagcggcggcggcggcagcggcggcggcggcagcaccgagaacaccctgcagctggccatcatcagcagaatcaagtga

SEQ ID NO: 632 - RNA, 1404 nt, synthetic construct
  misc_feature 1..1404: note Artificial____LumSynth(1-154_C37A_N102D)_Linker(GGS)4-GGG_E c(J96)-FimH(22-300)_Linker-PGDGN_Ec(J96)-FimG(24-37) CDS opt4
  source 1..1404: mol_type = other RNA
atgcagatctacgagggcaagctgaccgccgagggcctgagattcggcatcgtggccagcagattcaaccacgccctggtggacagactggtggagggcgccatcgacgccatcgtgagacacggcggcagagaggaggacatcaccctggtgagagtgcccggcagctgggagatccccgtggccgccggcgagctggccagaaaggaggacatcgacgccgtgatcgccatcggcgtgctgatcagaggcgccaccccccacttcgactacatcgccagcgaggtgagcaagggcctggccgacctgagcctggagctgagaaagcccatcaccttcggcgtgatcaccgccgacaccctggagcaggccatcgagagagccggcaccaagcacggcaacaagggctgggaggccgccctgagcgccatcgagatggccaacctgttcaagagcctgagaggcggcagcggcggcagcggcggcagcggcggcagcggcggcggcttcgcctgcaagaccgccaacggcaccgccatccccatcggcggcggcagcgccaacgtgtacgtgaacctggcccccgtggtgaacgtgggccagaacctggtggtggacctgagcacccagatcttctgccacaacgactaccccgagaccatcaccgactacgtgaccctgcagagaggcagcgcctacggcggcgtgctgagcaacttcagcggcaccgtgaagtacagcggcagcagctaccccttccccaccaccagcgagacccccagagtggtgtacaacagcagaaccgacaagccctggcccgtggccctgtacctgacccccgtgagcagcgccggcggcgtggccatcaaggccggcagcctgatcgccgtgctgatcctgagacagaccaacaactacaacagcgacgacttccagttcgtgtggaacatctacgccaacaacgacgtggtggtgcccaccggcggctgcgacgtgagcgccagagacgtgaccgtgaccctgcccgactaccccggcagcgtgcccatccccctgaccgtgtactgcgccaagagccagaacctgggctactacctgagcggcaccaccgccgacgccggcaacagcatcttcaccaacaccgccagcttcagccccgcccagggcgtgggcgtgcagctgaccagaaacggcaccatcatccccgccaacaacaccgtgagcctgggcgccgtgggcaccagcgccgtgagcctgggcctgaccgccaactacgccagaaccggcggccaggtgaccgccggcaacgtgcagagcatcatcggcgtgaccttcgtgtaccagcccggcgacggcaacgccgacgtgaccatcaccgtgaacggcaaggtggtggccaagtga

SEQ ID NO: 633 - RNA, 1422 nt, synthetic construct
  misc_feature 1..1422: note Artificial____HsIgE(1-18)_Ec(J96)-FimH(22-300)_Linker-PGDGN _Ec(J96)-FimG(24-37)_Linker-SGG_LumSynth(1-154_C37A_N102D) CDS opt4
  source 1..1422: mol_type = other RNA
atggactggacctggatcctgttcctggtggccgccgccaccagagtgcacagcttcgcctgcaagaccgccaacggcaccgccatccccatcggcggcggcagcgccaacgtgtacgtgaacctggcccccgtggtgaacgtgggccagaacctggtggtggacctgagcacccagatcttctgccacaacgactaccccgagaccatcaccgactacgtgaccctgcagagaggcagcgcctacggcggcgtgctgagcaacttcagcggcaccgtgaagtacagcggcagcagctaccccttccccaccaccagcgagacccccagagtggtgtacaacagcagaaccgacaagccctggcccgtggccctgtacctgacccccgtgagcagcgccggcggcgtggccatcaaggccggcagcctgatcgccgtgctgatcctgagacagaccaacaactacaacagcgacgacttccagttcgtgtggaacatctacgccaacaacgacgtggtggtgcccaccggcggctgcgacgtgagcgccagagacgtgaccgtgaccctgcccgactaccccggcagcgtgcccatccccctgaccgtgtactgcgccaagagccagaacctgggctactacctgagcggcaccaccgccgacgccggcaacagcatcttcaccaacaccgccagcttcagccccgcccagggcgtgggcgtgcagctgaccagaaacggcaccatcatccccgccaacaacaccgtgagcctgggcgccgtgggcaccagcgccgtgagcctgggcctgaccgccaactacgccagaaccggcggccaggtgaccgccggcaacgtgcagagcatcatcggcgtgaccttcgtgtaccagcccggcgacggcaacgccgacgtgaccatcaccgtgaacggcaaggtggtggccaagagcggcggcatgcagatctacgagggcaagctgaccgccgagggcctgagattcggcatcgtggccagcagattcaaccacgccctggtggacagactggtggagggcgccatcgacgccatcgtgagacacggcggcagagaggaggacatcaccctggtgagagtgcccggcagctgggagatccccgtggccgccggcgagctggccagaaaggaggacatcgacgccgtgatcgccatcggcgtgctgatcagaggcgccaccccccacttcgactacatcgccagcgaggtgagcaagggcctggccgacctgagcctggagctgagaaagcccatcaccttcggcgtgatcaccgccgacaccctggagcaggccatcgagagagccggcaccaagcacggcaacaagggctgggaggccgccctgagcgccatcgagatggccaacctgttcaagagcctgagatga

SEQ ID NO: 634 - RNA, 1449 nt, synthetic construct
  misc_feature 1..1449: note Artificial____HsIgE(1-18)_Ec(J96)-FimH(22-300)_Linker-PGDGN _Ec(J96)-FimG(24-37)_Linker-SGG_Ferritin(5-167_N19Q) CDS opt4
  source 1..1449: mol_type = other RNA
atggactggacctggatcctgttcctggtggccgccgccaccagagtgcacagcttcgcctgcaagaccgccaacggcaccgccatccccatcggcggcggcagcgccaacgtgtacgtgaacctggcccccgtggtgaacgtgggccagaacctggtggtggacctgagcacccagatcttctgccacaacgactaccccgagaccatcaccgactacgtgaccctgcagagaggcagcgcctacggcggcgtgctgagcaacttcagcggcaccgtgaagtacagcggcagcagctaccccttccccaccaccagcgagacccccagagtggtgtacaacagcagaaccgacaagccctggcccgtggccctgtacctgacccccgtgagcagcgccggcggcgtggccatcaaggccggcagcctgatcgccgtgctgatcctgagacagaccaacaactacaacagcgacgacttccagttcgtgtggaacatctacgccaacaacgacgtggtggtgcccaccggcggctgcgacgtgagcgccagagacgtgaccgtgaccctgcccgactaccccggcagcgtgcccatccccctgaccgtgtactgcgccaagagccagaacctgggctactacctgagcggcaccaccgccgacgccggcaacagcatcttcaccaacaccgccagcttcagccccgcccagggcgtgggcgtgcagctgaccagaaacggcaccatcatccccgccaacaacaccgtgagcctgggcgccgtgggcaccagcgccgtgagcctgggcctgaccgccaactacgccagaaccggcggccaggtgaccgccggcaacgtgcagagcatcatcggcgtgaccttcgtgtaccagcccggcgacggcaacgccgacgtgaccatcaccgtgaacggcaaggtggtggccaagagcggcggcgacatcatcaagctgctgaacgagcaggtgaacaaggagatgcagagcagcaacctgtacatgagcatgagcagctggtgctacacccacagcctggacggcgccggcctgttcctgttcgaccacgccgccgaggagtacgagcacgccaagaagctgatcatcttcctgaacgagaacaacgtgcccgtgcagctgaccagcatcagcgcccccgagcacaagttcgagggcctgacccagatcttccagaaggcctacgagcacgagcagcacatcagcgagagcatcaacaacatcgtggaccacgccatcaagagcaaggaccacgccaccttcaacttcctgcagtggtacgtggccgagcagcacgaggaggaggtgctgttcaaggacatcctggacaagatcgagctgatcggcaacgagaaccacggcctgtacctggccgaccagtacgtgaagggcatcgccaagagcagaaagagctga

SEQ ID NO: 635 - RNA, 1479 nt, synthetic construct
  misc_feature 1..1479: note Artificial____MmIgK(1-20)_Ec(J96)-FimH(22-300)_Linker-PGDGN _Ec(J96)-FimG(24-37)_Linker-(GGS)4_Ferritin(5-166) CDS opt4
  source 1..1479: mol_type = other RNA
atggagaccgacaccctgctgctgtgggtgctgctgctgtgggtgcccggcagcaccggcttcgcctgcaagaccgccaacggcaccgccatccccatcggcggcggcagcgccaacgtgtacgtgaacctggcccccgtggtgaacgtgggccagaacctggtggtggacctgagcacccagatcttctgccacaacgactaccccgagaccatcaccgactacgtgaccctgcagagaggcagcgcctacggcggcgtgctgagcaacttcagcggcaccgtgaagtacagcggcagcagctaccccttccccaccaccagcgagacccccagagtggtgtacaacagcagaaccgacaagccctggcccgtggccctgtacctgacccccgtgagcagcgccggcggcgtggccatcaaggccggcagcctgatcgccgtgctgatcctgagacagaccaacaactacaacagcgacgacttccagttcgtgtggaacatctacgccaacaacgacgtggtggtgcccaccggcggctgcgacgtgagcgccagagacgtgaccgtgaccctgcccgactaccccggcagcgtgcccatccccctgaccgtgtactgcgccaagagccagaacctgggctactacctgagcggcaccaccgccgacgccggcaacagcatcttcaccaacaccgccagcttcagccccgcccagggcgtgggcgtgcagctgaccagaaacggcaccatcatccccgccaacaacaccgtgagcctgggcgccgtgggcaccagcgccgtgagcctgggcctgaccgccaactacgccagaaccggcggccaggtgaccgccggcaacgtgcagagcatcatcggcgtgaccttcgtgtaccagcccggcgacggcaacgccgacgtgaccatcaccgtgaacggcaaggtggtggccaagggcggcagcggcggcagcggcggcagcggcggcagcgacatcatcaagctgctgaacgagcaggtgaacaaggagatgaacagcagcaacctgtacatgagcatgagcagctggtgctacacccacagcctggacggcgccggcctgttcctgttcgaccacgccgccgaggagtacgagcacgccaagaagctgatcatcttcctgaacgagaacaacgtgcccgtgcagctgaccagcatcagcgcccccgagcacaagttcgagggcctgacccagatcttccagaaggcctacgagcacgagcagcacatcagcgagagcatcaacaacatcgtggaccacgccatcaagagcaaggaccacgccaccttcaacttcctgcagtggtacgtggccgagcagcacgaggaggaggtgctgttcaaggacatcctggacaagatcgagctgatcggcaacgagaaccacggcctgtacctggccgaccagtacgtgaagggcatcgccaagagcagaaagtga

SEQ ID NO: 636 - RNA, 1122 nt, synthetic construct
  misc_feature 1..1122: note Artificial____HsIgE(1-18)_Ec(J96)-FimH(22-300)_Linker-PGDGN _Ec(J96)-FimG(24-37)_TMdomain-HA(510-566) CDS opt4
  source 1..1122: mol_type = other RNA
atggactggacctggatcctgttcctggtggccgccgccaccagagtgcacagcttcgcctgcaagaccgccaacggcaccgccatccccatcggcggcggcagcgccaacgtgtacgtgaacctggcccccgtggtgaacgtgggccagaacctggtggtggacctgagcacccagatcttctgccacaacgactaccccgagaccatcaccgactacgtgaccctgcagagaggcagcgcctacggcggcgtgctgagcaacttcagcggcaccgtgaagtacagcggcagcagctaccccttccccaccaccagcgagacccccagagtggtgtacaacagcagaaccgacaagccctggcccgtggccctgtacctgacccccgtgagcagcgccggcggcgtggccatcaaggccggcagcctgatcgccgtgctgatcctgagacagaccaacaactacaacagcgacgacttccagttcgtgtggaacatctacgccaacaacgacgtggtggtgcccaccggcggctgcgacgtgagcgccagagacgtgaccgtgaccctgcccgactaccccggcagcgtgcccatccccctgaccgtgtactgcgccaagagccagaacctgggctactacctgagcggcaccaccgccgacgccggcaacagcatcttcaccaacaccgccagcttcagccccgcccagggcgtgggcgtgcagctgaccagaaacggcaccatcatccccgccaacaacaccgtgagcctgggcgccgtgggcaccagcgccgtgagcctgggcctgaccgccaactacgccagaaccggcggccaggtgaccgccggcaacgtgcagagcatcatcggcgtgaccttcgtgtaccagcccggcgacggcaacgccgacgtgaccatcaccgtgaacggcaaggtggtggccaaggccaagctgaacagagaggagatcgacggcgtgaagctggagagcaccagaatctaccagatcctggccatctacagcaccgtggccagcagcctggtgctggtggtgagcctgggcgccatcagcttctggatgtgcagcaacggcagcctgcagtgcagaatctgcatctga

SEQ ID NO: 637 - RNA, 1455 nt, synthetic construct
  misc_feature 1..1455: note Artificial____HsIgE(1-18)_LumSynth(1-154_C37A_N102D)_Linker (GGS)4-GGG_Ec(J96)-FimH(22-300)_Linker-PGDGN_Ec(J96)-FimG(2 4-37) CDS opt4
  source 1..1455: mol_type = other RNA
atggactggacctggatcctgttcctggtggccgccgccaccagagtgcacagccagatctacgagggcaagctgaccgccgagggcctgagattcggcatcgtggccagcagattcaaccacgccctggtggacagactggtggagggcgccatcgacgccatcgtgagacacggcggcagagaggaggacatcaccctggtgagagtgcccggcagctgggagatccccgtggccgccggcgagctggccagaaaggaggacatcgacgccgtgatcgccatcggcgtgctgatcagaggcgccaccccccacttcgactacatcgccagcgaggtgagcaagggcctggccgacctgagcctggagctgagaaagcccatcaccttcggcgtgatcaccgccgacaccctggagcaggccatcgagagagccggcaccaagcacggcaacaagggctgggaggccgccctgagcgccatcgagatggccaacctgttcaagagcctgagaggcggcagcggcggcagcggcggcagcggcggcagcggcggcggcttcgcctgcaagaccgccaacggcaccgccatccccatcggcggcggcagcgccaacgtgtacgtgaacctggcccccgtggtgaacgtgggccagaacctggtggtggacctgagcacccagatcttctgccacaacgactaccccgagaccatcaccgactacgtgaccctgcagagaggcagcgcctacggcggcgtgctgagcaacttcagcggcaccgtgaagtacagcggcagcagctaccccttccccaccaccagcgagacccccagagtggtgtacaacagcagaaccgacaagccctggcccgtggccctgtacctgacccccgtgagcagcgccggcggcgtggccatcaaggccggcagcctgatcgccgtgctgatcctgagacagaccaacaactacaacagcgacgacttccagttcgtgtggaacatctacgccaacaacgacgtggtggtgcccaccggcggctgcgacgtgagcgccagagacgtgaccgtgaccctgcccgactaccccggcagcgtgcccatccccctgaccgtgtactgcgccaagagccagaacctgggctactacctgagcggcaccaccgccgacgccggcaacagcatcttcaccaacaccgccagcttcagccccgcccagggcgtgggcgtgcagctgaccagaaacggcaccatcatccccgccaacaacaccgtgagcctgggcgccgtgggcaccagcgccgtgagcctgggcctgaccgccaactacgccagaaccggcggccaggtgaccgccggcaacgtgcagagcatcatcggcgtgaccttcgtgtaccagcccggcgacggcaacgccgacgtgaccatcaccgtgaacggcaaggtggtggccaagtga

SEQ ID NO: 638 - RNA, 1422 nt, synthetic construct
  misc_feature 1..1422: note Artificial____HsIgE(1-18)_Ec(J96)-FimH(22-300_N28S_N91S_N24 9Q)_Linker-PGDGN_Ec(J96)-FimG(24-37)_Linker-SGG_LumSynth(1- 154_C37A_N102D) CDS opt4
  source 1..1422: mol_type = other RNA
atggactggacctggatcctgttcctggtggccgccgccaccagagtgcacagcttcgcctgcaagaccgccagcggcaccgccatccccatcggcggcggcagcgccaacgtgtacgtgaacctggcccccgtggtgaacgtgggccagaacctggtggtggacctgagcacccagatcttctgccacaacgactaccccgagaccatcaccgactacgtgaccctgcagagaggcagcgcctacggcggcgtgctgagcagcttcagcggcaccgtgaagtacagcggcagcagctaccccttccccaccaccagcgagacccccagagtggtgtacaacagcagaaccgacaagccctggcccgtggccctgtacctgacccccgtgagcagcgccggcggcgtggccatcaaggccggcagcctgatcgccgtgctgatcctgagacagaccaacaactacaacagcgacgacttccagttcgtgtggaacatctacgccaacaacgacgtggtggtgcccaccggcggctgcgacgtgagcgccagagacgtgaccgtgaccctgcccgactaccccggcagcgtgcccatccccctgaccgtgtactgcgccaagagccagaacctgggctactacctgagcggcaccaccgccgacgccggcaacagcatcttcaccaacaccgccagcttcagccccgcccagggcgtgggcgtgcagctgaccagacagggcaccatcatccccgccaacaacaccgtgagcctgggcgccgtgggcaccagcgccgtgagcctgggcctgaccgccaactacgccagaaccggcggccaggtgaccgccggcaacgtgcagagcatcatcggcgtgaccttcgtgtaccagcccggcgacggcaacgccgacgtgaccatcaccgtgaacggcaaggtggtggccaagagcggcggcatgcagatctacgagggcaagctgaccgccgagggcctgagattcggcatcgtggccagcagattcaaccacgccctggtggacagactggtggagggcgccatcgacgccatcgtgagacacggcggcagagaggaggacatcaccctggtgagagtgcccggcagctgggagatccccgtggccgccggcgagctggccagaaaggaggacatcgacgccgtgatcgccatcggcgtgctgatcagaggcgccaccccccacttcgactacatcgccagcgaggtgagcaagggcctggccgacctgagcctggagctgagaaagcccatcaccttcggcgtgatcaccgccgacaccctggagcaggccatcgagagagccggcaccaagcacggcaacaagggctgggaggccgccctgagcgccatcgagatggccaacctgttcaagagcctgagatga

SEQ ID NO: 639 - RNA, 1422 nt, synthetic construct
  misc_feature 1..1422: note Artificial____HsIgE(1-18)_Ec(J96)-FimH(22-300_N28S_N91S_N24 9Q_N256D)_Linker-PGDGN_Ec(J96)-FimG(24-37)_Linker-SGG_LumSy nth(1-154_C37A_N102D) CDS opt4
  source 1..1422: mol_type = other RNA
atggactggacctggatcctgttcctggtggccgccgccaccagagtgcacagcttcgcctgcaagaccgccagcggcaccgccatccccatcggcggcggcagcgccaacgtgtacgtgaacctggcccccgtggtgaacgtgggccagaacctggtggtggacctgagcacccagatcttctgccacaacgactaccccgagaccatcaccgactacgtgaccctgcagagaggcagcgcctacggcggcgtgctgagcagcttcagcggcaccgtgaagtacagcggcagcagctaccccttccccaccaccagcgagacccccagagtggtgtacaacagcagaaccgacaagccctggcccgtggccctgtacctgacccccgtgagcagcgccggcggcgtggccatcaaggccggcagcctgatcgccgtgctgatcctgagacagaccaacaactacaacagcgacgacttccagttcgtgtggaacatctacgccaacaacgacgtggtggtgcccaccggcggctgcgacgtgagcgccagagacgtgaccgtgaccctgcccgactaccccggcagcgtgcccatccccctgaccgtgtactgcgccaagagccagaacctgggctactacctgagcggcaccaccgccgacgccggcaacagcatcttcaccaacaccgccagcttcagccccgcccagggcgtgggcgtgcagctgaccagacagggcaccatcatccccgccgacaacaccgtgagcctgggcgccgtgggcaccagcgccgtgagcctgggcctgaccgccaactacgccagaaccggcggccaggtgaccgccggcaacgtgcagagcatcatcggcgtgaccttcgtgtaccagcccggcgacggcaacgccgacgtgaccatcaccgtgaacggcaaggtggtggccaagagcggcggcatgcagatctacgagggcaagctgaccgccgagggcctgagattcggcatcgtggccagcagattcaaccacgccctggtggacagactggtggagggcgccatcgacgccatcgtgagacacggcggcagagaggaggacatcaccctggtgagagtgcccggcagctgggagatccccgtggccgccggcgagctggccagaaaggaggacatcgacgccgtgatcgccatcggcgtgctgatcagaggcgccaccccccacttcgactacatcgccagcgaggtgagcaagggcctggccgacctgagcctggagctgagaaagcccatcaccttcggcgtgatcaccgccgacaccctggagcaggccatcgagagagccggcaccaagcacggcaacaagggctgggaggccgccctgagcgccatcgagatggccaacctgttcaagagcctgagatga

SEQ ID NO: 640 - RNA, 1422 nt, synthetic construct
  misc_feature 1..1422: note Artificial____HsIgE(1-18)_Ec(J96)-FimH(22-300_N28S_V48C_L55 C_N91S_N249Q)_Linker-PGDGN_Ec(J96)-FimG(24-37)_Linker-SGG_L umSynth(1-154_C37A_N102D) CDS opt4
  source 1..1422: mol_type = other RNA
atggactggacctggatcctgttcctggtggccgccgccaccagagtgcacagcttcgcctgcaagaccgccagcggcaccgccatccccatcggcggcggcagcgccaacgtgtacgtgaacctggccccctgcgtgaacgtgggccagaactgcgtggtggacctgagcacccagatcttctgccacaacgactaccccgagaccatcaccgactacgtgaccctgcagagaggcagcgcctacggcggcgtgctgagcagcttcagcggcaccgtgaagtacagcggcagcagctaccccttccccaccaccagcgagacccccagagtggtgtacaacagcagaaccgacaagccctggcccgtggccctgtacctgacccccgtgagcagcgccggcggcgtggccatcaaggccggcagcctgatcgccgtgctgatcctgagacagaccaacaactacaacagcgacgacttccagttcgtgtggaacatctacgccaacaacgacgtggtggtgcccaccggcggctgcgacgtgagcgccagagacgtgaccgtgaccctgcccgactaccccggcagcgtgcccatccccctgaccgtgtactgcgccaagagccagaacctgggctactacctgagcggcaccaccgccgacgccggcaacagcatcttcaccaacaccgccagcttcagccccgcccagggcgtgggcgtgcagctgaccagacagggcaccatcatccccgccaacaacaccgtgagcctgggcgccgtgggcaccagcgccgtgagcctgggcctgaccgccaactacgccagaaccggcggccaggtgaccgccggcaacgtgcagagcatcatcggcgtgaccttcgtgtaccagcccggcgacggcaacgccgacgtgaccatcaccgtgaacggcaaggtggtggccaagagcggcggcatgcagatctacgagggcaagctgaccgccgagggcctgagattcggcatcgtggccagcagattcaaccacgccctggtggacagactggtggagggcgccatcgacgccatcgtgagacacggcggcagagaggaggacatcaccctggtgagagtgcccggcagctgggagatccccgtggccgccggcgagctggccagaaaggaggacatcgacgccgtgatcgccatcggcgtgctgatcagaggcgccaccccccacttcgactacatcgccagcgaggtgagcaagggcctggccgacctgagcctggagctgagaaagcccatcaccttcggcgtgatcaccgccgacaccctggagcaggccatcgagagagccggcaccaagcacggcaacaagggctgggaggccgccctgagcgccatcgagatggccaacctgttcaagagcctgagatga

SEQ ID NO: 641 - RNA, 1422 nt, synthetic construct
  misc_feature 1..1422: note Artificial____HsIgE(1-18)_Ec(J96)-FimH(22-300_F165V)_Linker -PGDGN_Ec(J96)-FimG(24-37)_Linker-SGG_LumSynth(1-154_C37A_N 102D) CDS opt4
  source 1..1422: mol_type = other RNA
atggactggacctggatcctgttcctggtggccgccgccaccagagtgcacagcttcgcctgcaagaccgccaacggcaccgccatccccatcggcggcggcagcgccaacgtgtacgtgaacctggcccccgtggtgaacgtgggccagaacctggtggtggacctgagcacccagatcttctgccacaacgactaccccgagaccatcaccgactacgtgaccctgcagagaggcagcgcctacggcggcgtgctgagcaacttcagcggcaccgtgaagtacagcggcagcagctaccccttccccaccaccagcgagacccccagagtggtgtacaacagcagaaccgacaagccctggcccgtggccctgtacctgacccccgtgagcagcgccggcggcgtggccatcaaggccggcagcctgatcgccgtgctgatcctgagacagaccaacaactacaacagcgacgacttccaggtggtgtggaacatctacgccaacaacgacgtggtggtgcccaccggcggctgcgacgtgagcgccagagacgtgaccgtgaccctgcccgactaccccggcagcgtgcccatccccctgaccgtgtactgcgccaagagccagaacctgggctactacctgagcggcaccaccgccgacgccggcaacagcatcttcaccaacaccgccagcttcagccccgcccagggcgtgggcgtgcagctgaccagaaacggcaccatcatccccgccaacaacaccgtgagcctgggcgccgtgggcaccagcgccgtgagcctgggcctgaccgccaactacgccagaaccggcggccaggtgaccgccggcaacgtgcagagcatcatcggcgtgaccttcgtgtaccagcccggcgacggcaacgccgacgtgaccatcaccgtgaacggcaaggtggtggccaagagcggcggcatgcagatctacgagggcaagctgaccgccgagggcctgagattcggcatcgtggccagcagattcaaccacgccctggtggacagactggtggagggcgccatcgacgccatcgtgagacacggcggcagagaggaggacatcaccctggtgagagtgcccggcagctgggagatccccgtggccgccggcgagctggccagaaaggaggacatcgacgccgtgatcgccatcggcgtgctgatcagaggcgccaccccccacttcgactacatcgccagcgaggtgagcaagggcctggccgacctgagcctggagctgagaaagcccatcaccttcggcgtgatcaccgccgacaccctggagcaggccatcgagagagccggcaccaagcacggcaacaagggctgggaggccgccctgagcgccatcgagatggccaacctgttcaagagcctgagatga

SEQ ID NO: 642 - RNA, 1449 nt, synthetic construct
  misc_feature 1..1449: note Artificial____HsIgE(1-18)_Ec(J96)-FimH(22-300_N28S_N91S_N24 9Q)_Linker-PGDGN_Ec(J96)-FimG(24-37)_Linker-SGG_Ferritin(5- 167_N19Q) CDS opt4
  source 1..1449: mol_type = other RNA
atggactggacctggatcctgttcctggtggccgccgccaccagagtgcacagcttcgcctgcaagaccgccagcggcaccgccatccccatcggcggcggcagcgccaacgtgtacgtgaacctggcccccgtggtgaacgtgggccagaacctggtggtggacctgagcacccagatcttctgccacaacgactaccccgagaccatcaccgactacgtgaccctgcagagaggcagcgcctacggcggcgtgctgagcagcttcagcggcaccgtgaagtacagcggcagcagctaccccttccccaccaccagcgagacccccagagtggtgtacaacagcagaaccgacaagccctggcccgtggccctgtacctgacccccgtgagcagcgccggcggcgtggccatcaaggccggcagcctgatcgccgtgctgatcctgagacagaccaacaactacaacagcgacgacttccagttcgtgtggaacatctacgccaacaacgacgtggtggtgcccaccggcggctgcgacgtgagcgccagagacgtgaccgtgaccctgcccgactaccccggcagcgtgcccatccccctgaccgtgtactgcgccaagagccagaacctgggctactacctgagcggcaccaccgccgacgccggcaacagcatcttcaccaacaccgccagcttcagccccgcccagggcgtgggcgtgcagctgaccagacagggcaccatcatccccgccaacaacaccgtgagcctgggcgccgtgggcaccagcgccgtgagcctgggcctgaccgccaactacgccagaaccggcggccaggtgaccgccggcaacgtgcagagcatcatcggcgtgaccttcgtgtaccagcccggcgacggcaacgccgacgtgaccatcaccgtgaacggcaaggtggtggccaagagcggcggcgacatcatcaagctgctgaacgagcaggtgaacaaggagatgcagagcagcaacctgtacatgagcatgagcagctggtgctacacccacagcctggacggcgccggcctgttcctgttcgaccacgccgccgaggagtacgagcacgccaagaagctgatcatcttcctgaacgagaacaacgtgcccgtgcagctgaccagcatcagcgcccccgagcacaagttcgagggcctgacccagatcttccagaaggcctacgagcacgagcagcacatcagcgagagcatcaacaacatcgtggaccacgccatcaagagcaaggaccacgccaccttcaacttcctgcagtggtacgtggccgagcagcacgaggaggaggtgctgttcaaggacatcctggacaagatcgagctgatcggcaacgagaaccacggcctgtacctggccgaccagtacgtgaagggcatcgccaagagcagaaagagctga

SEQ ID NO: 643 - RNA, 1449 nt, synthetic construct
  misc_feature 1..1449: note Artificial____HsIgE(1-18)_Ec(J96)-FimH(22-300_N28S_N91S_N24 9Q_N256D)_Linker-PGDGN_Ec(J96)-FimG(24-37)_Linker-SGG_Ferri tin(5-167_N19Q) CDS opt4
  source 1..1449: mol_type = other RNA
atggactggacctggatcctgttcctggtggccgccgccaccagagtgcacagcttcgcctgcaagaccgccagcggcaccgccatccccatcggcggcggcagcgccaacgtgtacgtgaacctggcccccgtggtgaacgtgggccagaacctggtggtggacctgagcacccagatcttctgccacaacgactaccccgagaccatcaccgactacgtgaccctgcagagaggcagcgcctacggcggcgtgctgagcagcttcagcggcaccgtgaagtacagcggcagcagctaccccttccccaccaccagcgagacccccagagtggtgtacaacagcagaaccgacaagccctggcccgtggccctgtacctgacccccgtgagcagcgccggcggcgtggccatcaaggccggcagcctgatcgccgtgctgatcctgagacagaccaacaactacaacagcgacgacttccagttcgtgtggaacatctacgccaacaacgacgtggtggtgcccaccggcggctgcgacgtgagcgccagagacgtgaccgtgaccctgcccgactaccccggcagcgtgcccatccccctgaccgtgtactgcgccaagagccagaacctgggctactacctgagcggcaccaccgccgacgccggcaacagcatcttcaccaacaccgccagcttcagccccgcccagggcgtgggcgtgcagctgaccagacagggcaccatcatccccgccgacaacaccgtgagcctgggcgccgtgggcaccagcgccgtgagcctgggcctgaccgccaactacgccagaaccggcggccaggtgaccgccggcaacgtgcagagcatcatcggcgtgaccttcgtgtaccagcccggcgacggcaacgccgacgtgaccatcaccgtgaacggcaaggtggtggccaagagcggcggcgacatcatcaagctgctgaacgagcaggtgaacaaggagatgcagagcagcaacctgtacatgagcatgagcagctggtgctacacccacagcctggacggcgccggcctgttcctgttcgaccacgccgccgaggagtacgagcacgccaagaagctgatcatcttcctgaacgagaacaacgtgcccgtgcagctgaccagcatcagcgcccccgagcacaagttcgagggcctgacccagatcttccagaaggcctacgagcacgagcagcacatcagcgagagcatcaacaacatcgtggaccacgccatcaagagcaaggaccacgccaccttcaacttcctgcagtggtacgtggccgagcagcacgaggaggaggtgctgttcaaggacatcctggacaagatcgagctgatcggcaacgagaaccacggcctgtacctggccgaccagtacgtgaagggcatcgccaagagcagaaagagctga

SEQ ID NO: 644 - RNA, 1449 nt, synthetic construct
  misc_feature 1..1449: note Artificial____HsIgE(1-18)_Ec(J96)-FimH(22-300_N28S_V48C_L55 C_N91S_N249Q)_Linker-PGDGN_Ec(J96)-FimG(24-37)_Linker-SGG_F erritin(5-167_N19Q) CDS opt4
  source 1..1449: mol_type = other RNA
atggactggacctggatcctgttcctggtggccgccgccaccagagtgcacagcttcgcctgcaagaccgccagcggcaccgccatccccatcggcggcggcagcgccaacgtgtacgtgaacctggccccctgcgtgaacgtgggccagaactgcgtggtggacctgagcacccagatcttctgccacaacgactaccccgagaccatcaccgactacgtgaccctgcagagaggcagcgcctacggcggcgtgctgagcagcttcagcggcaccgtgaagtacagcggcagcagctaccccttccccaccaccagcgagacccccagagtggtgtacaacagcagaaccgacaagccctggcccgtggccctgtacctgacccccgtgagcagcgccggcggcgtggccatcaaggccggcagcctgatcgccgtgctgatcctgagacagaccaacaactacaacagcgacgacttccagttcgtgtggaacatctacgccaacaacgacgtggtggtgcccaccggcggctgcgacgtgagcgccagagacgtgaccgtgaccctgcccgactaccccggcagcgtgcccatccccctgaccgtgtactgcgccaagagccagaacctgggctactacctgagcggcaccaccgccgacgccggcaacagcatcttcaccaacaccgccagcttcagccccgcccagggcgtgggcgtgcagctgaccagacagggcaccatcatccccgccaacaacaccgtgagcctgggcgccgtgggcaccagcgccgtgagcctgggcctgaccgccaactacgccagaaccggcggccaggtgaccgccggcaacgtgcagagcatcatcggcgtgaccttcgtgtaccagcccggcgacggcaacgccgacgtgaccatcaccgtgaacggcaaggtggtggccaagagcggcggcgacatcatcaagctgctgaacgagcaggtgaacaaggagatgcagagcagcaacctgtacatgagcatgagcagctggtgctacacccacagcctggacggcgccggcctgttcctgttcgaccacgccgccgaggagtacgagcacgccaagaagctgatcatcttcctgaacgagaacaacgtgcccgtgcagctgaccagcatcagcgcccccgagcacaagttcgagggcctgacccagatcttccagaaggcctacgagcacgagcagcacatcagcgagagcatcaacaacatcgtggaccacgccatcaagagcaaggaccacgccaccttcaacttcctgcagtggtacgtggccgagcagcacgaggaggaggtgctgttcaaggacatcctggacaagatcgagctgatcggcaacgagaaccacggcctgtacctggccgaccagtacgtgaagggcatcgccaagagcagaaagagctga

SEQ ID NO: 645 - RNA, 1449 nt, synthetic construct
  misc_feature 1..1449: note Artificial____HsIgE(1-18)_Ec(J96)-FimH(22-300_F165V)_Linker -PGDGN_Ec(J96)-FimG(24-37)_Linker-SGG_Ferritin(5-167_N19Q) CDS opt4
  source 1..1449: mol_type = other RNA
atggactggacctggatcctgttcctggtggccgccgccaccagagtgcacagcttcgcctgcaagaccgccaacggcaccgccatccccatcggcggcggcagcgccaacgtgtacgtgaacctggcccccgtggtgaacgtgggccagaacctggtggtggacctgagcacccagatcttctgccacaacgactaccccgagaccatcaccgactacgtgaccctgcagagaggcagcgcctacggcggcgtgctgagcaacttcagcggcaccgtgaagtacagcggcagcagctaccccttccccaccaccagcgagacccccagagtggtgtacaacagcagaaccgacaagccctggcccgtggccctgtacctgacccccgtgagcagcgccggcggcgtggccatcaaggccggcagcctgatcgccgtgctgatcctgagacagaccaacaactacaacagcgacgacttccaggtggtgtggaacatctacgccaacaacgacgtggtggtgcccaccggcggctgcgacgtgagcgccagagacgtgaccgtgaccctgcccgactaccccggcagcgtgcccatccccctgaccgtgtactgcgccaagagccagaacctgggctactacctgagcggcaccaccgccgacgccggcaacagcatcttcaccaacaccgccagcttcagccccgcccagggcgtgggcgtgcagctgaccagaaacggcaccatcatccccgccaacaacaccgtgagcctgggcgccgtgggcaccagcgccgtgagcctgggcctgaccgccaactacgccagaaccggcggccaggtgaccgccggcaacgtgcagagcatcatcggcgtgaccttcgtgtaccagcccggcgacggcaacgccgacgtgaccatcaccgtgaacggcaaggtggtggccaagagcggcggcgacatcatcaagctgctgaacgagcaggtgaacaaggagatgcagagcagcaacctgtacatgagcatgagcagctggtgctacacccacagcctggacggcgccggcctgttcctgttcgaccacgccgccgaggagtacgagcacgccaagaagctgatcatcttcctgaacgagaacaacgtgcccgtgcagctgaccagcatcagcgcccccgagcacaagttcgagggcctgacccagatcttccagaaggcctacgagcacgagcagcacatcagcgagagcatcaacaacatcgtggaccacgccatcaagagcaaggaccacgccaccttcaacttcctgcagtggtacgtggccgagcagcacgaggaggaggtgctgttcaaggacatcctggacaagatcgagctgatcggcaacgagaaccacggcctgtacctggccgaccagtacgtgaagggcatcgccaagagcagaaagagctga

SEQ ID NO: 646 - RNA, 726 nt, synthetic construct; identical to SEQ ID NO: 323
  misc_feature 1..726: note Artificial____Ec(J96)-FimC(1-36)_Ec(J96)-FimC(37-241) CDS opt5
  source 1..726: mol_type = other RNA

SEQ ID NO: 647 - RNA, 672 nt, synthetic construct
  misc_feature 1..672: note = Artificial____HsIgE(1-18)_Ec(J96)-FimC(37-241) CDS opt5
  source 1..672: mol_type = other RNA
atggactggacctggatcctgttcctcgtggccgctgccacaagagtccacagcggcgttgcgctgggggctacgcgggtgatttaccccgccggacagaagcaagtgcagcttgccgtcaccaacaatgatgagaactccacatatctgatccagtcttgggtggaaaatgctgacggcgttaaagatgggcgctttattgtgacccctcccctcttcgccatgaagggaaagaaggagaacacactgagaatccttgacgctaccaataaccagctgccgcaagatcgggaaagcctcttttggatgaatgtcaaagccattccttccatggacaagtctaagctgacagagaacaccctgcagctcgcgatcatcagccgcattaaactgtactatagacccgccaaacttgctctgcctcccgatcaggccgctgaaaaactccggttccgcagatccgccaattctctgacgcttatcaaccctaccccgtactatctgacagtgaccgagctcaatgcgggcacacgggttctggagaacgccctggtgccccctatgggggaaagcaccgtcaagctcccctccgacgctggaagcaatattacgtaccgcacaatcaacgattatggcgccctgacccctaaaatgacaggcgtgatggagtga

SEQ ID NO: 648 - RNA, 903 nt, synthetic construct; identical to SEQ ID NO: 237
  misc_feature 1..903: note Artificial____Ec(J96)-FimH(1-21)_Ec(J96)-FimH(22-300) CDS opt5
  source 1..903: mol_type = other RNA

SEQ ID NO: 649 - RNA, 894 nt, synthetic construct
  misc_feature 1..894: note = Artificial____HsIgE(1-18)_Ec(J96)-FimH(22-300) CDS opt5
  source 1..894: mol_type = other RNA
atggactggacctggatcctgttcctcgtggccgctgccacaagagtccacagctttgcgtgcaagacggctaacggcaccgccattcccatcgggggaggctccgccaatgtttacgtgaacctggctcctgtggtcaatgtggggcagaaccttgttgtggatctgtctacacaaattttctgtcataatgactatccggagaccatcacagattacgtcaccctccagcggggaagcgcctatggcggggtgctgtccaacttttctggaacagttaaatacagcggctcctcttatcccttccctaccacgagcgaaacaccccgcgtggtctacaattccagaaccgacaagccttggcccgtggctctttatctgacccctgtgagctctgccggcggggtcgcgattaaagccggatccctcatcgctgttctgatcctgcggcagacaaacaattacaacagcgatgactttcagttcgtgtggaatatttacgccaacaatgatgtggtcgtgccgaccggcgggtgcgacgtttctgctcgcgatgtgacggtcacactccccgactatcctggatccgtgcccatccctctgaccgtttactgtgccaagagccaaaaccttggctattacctgtctgggacaaccgcggatgccggaaattccatttttaccaacacagctagcttctcccccgcccagggcgtgggcgtccagctcacgagaaacgggaccatcattccggctaataacacagtgtctctgggagccgtcggcaccagcgccgtgtcccttgggctgacagctaattatgcgcggaccggaggccaggttacggccgggaacgtgcaaagcatcattggagtcacatttgtgtaccagtga

SEQ ID NO: 650 - RNA, 900 nt, synthetic construct
  misc_feature 1..900: note = Artificial____MmIgK(1-20)_Ec(J96)-FimH(22-300) CDS opt5
  source 1..900: mol_type = other RNA
atggagaccgacacactgctcctgtgggtgcttctgctctgggtccccggcagcacggggttcgcctgcaagaccgctaacggaacagccatccctattggcgggggatccgcgaatgtttacgtgaacctggctccggtggtcaatgtgggccagaaccttgttgtggatctgtctacccaaatcttttgtcacaatgactatcccgaaacaattaccgattacgtcacactccagagagggagcgcctatggaggcgtgctgtccaacttctctggcaccgttaaatacagcgggtcctcttatccttttcccacgaccagcgagacacctcgggtggtctacaattcccgcaccgacaagccctggcctgtggccctgtatctcacaccggtgagctctgctggaggcgtcgccatcaaagctgggtccctgattgccgttcttatcctgagacagaccaacaattacaacagcgatgacttccagtttgtgtggaatatctacgcgaacaatgatgtggtcgtgcccacgggaggctgcgacgtttctgcccgggatgtgacagtcaccctccctgactatcccgggtccgtgcctattcccctgacagtttactgtgctaagagccaaaaccttggatattacctgtctggcaccaccgccgatgctggcaattccatcttcacaaacacggccagcttttccccggcgcagggggtgggagtccagctcacccgcaacggcacaattatccctgccaataacaccgtgtctctgggggctgtcggaacaagcgccgtgtccctgggcctcaccgctaattatgccagaacagggggacaggttacggccggcaacgtgcaaagcattatcggcgtcaccttcgtgtaccagtga

SEQ ID NO: 651 - RNA, 960 nt, synthetic construct
  misc_feature 1..960: note Artificial____Ec(J96)-FimH(1-21)_Ec(J96)-FimH(22-300)_Linke r-PGDGN_Ec(J96)-FimG(24-37) CDS opt5
  source 1..960: mol_type = other RNA
atgaagagagtgatcaccctgttcgccgtcctcctgatgggctggagcgttaacgcttggtcctttgcctgcaaaacagcgaatgggacggctattcccatcggaggcgggtctgccaacgtgtacgtgaatcttgcccctgtcgtgaacgttggacagaatctggtggtcgacctcagcacccaaattttctgtcacaacgattatccggagacaatcaccgactacgtgacactgcagcggggctccgcttatgggggagttctttctaattttagcggcaccgtgaagtactccggctctagctatcccttccctacaacctccgaaacgccccgcgtcgtgtacaacagcagaaccgataaaccttggcccgtggccctgtatctcacacctgtctcttccgctgggggagttgccattaaggcgggcagcctgatcgccgtgctgatcctccggcagaccaataactacaattctgacgattttcagttcgtgtggaacatttacgctaataacgacgtcgtggttccgacagggggatgcgatgtgtccgcccgcgacgtcaccgtgacgctgcccgattatcctggcagcgttcccatccctcttacagtgtactgtgctaaatctcaaaatctggggtattacctctccggaaccacagccgacgcgggcaacagcatttttaccaacaccgcctccttctctcccgctcagggcgtcggggtgcagctgacaagaaatggaacgatcattccggccaacaataccgtcagccttggcgctgtggggacatccgccgttagcctgggactcaccgccaactatgctcggacaggcggacaggtgaccgcggggaatgtccaatctatcattggcgtgacgtttgtttaccagcctggcgatgggaacgccgacgtgacaatcaccgtcaatggaaaggtggtggctaagtga

SEQ ID NO: 652 - RNA, 951 nt, synthetic construct
  misc_feature 1..951: note Artificial____HsIgE(1-18)_Ec(J96)-FimH(22-300)_Linker-PGDGN _Ec(J96)-FimG(24-37) CDS opt5
  source 1..951: mol_type = other RNA
atggactggacctggatcctgttcctcgtggccgctgccacaagagtccacagctttgcgtgcaagacggctaacggcaccgccattcccatcgggggaggctccgccaatgtttacgtgaacctggctcctgtggtcaatgtggggcagaaccttgttgtggatctgtctacacaaattttctgtcataatgactatccggagaccatcacagattacgtcaccctccagcggggaagcgcctatggcggggtgctgtccaacttttctggaacagttaaatacagcggctcctcttatcccttccctaccacgagcgaaacaccccgcgtggtctacaattccagaaccgacaagccttggcccgtggctctttatctgacccctgtgagctctgccggcggggtcgcgattaaagccggatccctcatcgctgttctgatcctgcggcagacaaacaattacaacagcgatgactttcagttcgtgtggaatatttacgccaacaatgatgtggtcgtgccgaccggcgggtgcgacgtttctgctcgcgatgtgacggtcacactccccgactatcctggatccgtgcccatccctctgaccgtttactgtgccaagagccaaaaccttggctattacctgtctgggacaaccgcggatgccggaaattccatttttaccaacacagctagcttctcccccgcccagggcgtgggcgtccagctcacgagaaacgggaccatcattccggctaataacacagtgtctctgggagccgtcggcaccagcgccgtgtcccttgggctgacagctaattatgcgcggaccggaggccaggttacggccgggaacgtgcaaagcatcattggagtcacatttgtgtaccagcctggcgacggcaatgctgatgttaccatcaccgtgaacgggaaagtcgtggccaagtga

SEQ ID NO: 653 - RNA, 957 nt, synthetic construct
  misc_feature 1..957: note Artificial____HsIgE(1-18)_Ec(J96)-FimH(22-300)_Linker-G4SGG _Ec(J96)-FimG(24-37) CDS opt5
  source 1..957: mol_type = other RNA
atggactggacctggatcctgttcctcgtggccgctgccacaagagtccacagctttgcgtgcaagacggctaacggcaccgccattcccatcgggggaggctccgccaatgtttacgtgaacctggctcctgtggtcaatgtggggcagaaccttgttgtggatctgtctacacaaattttctgtcataatgactatccggagaccatcacagattacgtcaccctccagcggggaagcgcctatggcggggtgctgtccaacttttctggaacagttaaatacagcggctcctcttatcccttccctaccacgagcgaaacaccccgcgtggtctacaattccagaaccgacaagccttggcccgtggctctttatctgacccctgtgagctctgccggcggggtcgcgattaaagccggatccctcatcgctgttctgatcctgcggcagacaaacaattacaacagcgatgactttcagttcgtgtggaatatttacgccaacaatgatgtggtcgtgccgaccggcgggtgcgacgtttctgctcgcgatgtgacggtcacactccccgactatcctggatccgtgcccatccctctgaccgtttactgtgccaagagccaaaaccttggctattacctgtctgggacaaccgcggatgccggaaattccatttttaccaacacagctagcttctcccccgcccagggcgtgggcgtccagctcacgagaaacgggaccatcattccggctaataacacagtgtctctgggagccgtcggcaccagcgccgtgtcccttgggctgacagctaattatgcgcggaccggaggccaggttacggccgggaacgtgcaaagcatcattggagtcacatttgtgtaccagggcggcgggggatctggcggggctgacgttaccatcaccgtgaatggaaaagtcgtggccaagtga

SEQ ID NO: 654 - RNA, 957 nt, synthetic construct
  misc_feature 1..957: note Artificial____MmIgK(1-20)_Ec(J96)-FimH(22-300)_Linker-PGDGN _Ec(J96)-FimG(24-37) CDS opt5
  source 1..957: mol_type = other RNA
atggagaccgacacactgctcctgtgggtgcttctgctctgggtccccggcagcacggggttcgcctgcaagaccgctaacggaacagccatccctattggcgggggatccgcgaatgtttacgtgaacctggctccggtggtcaatgtgggccagaaccttgttgtggatctgtctacccaaatcttttgtcacaatgactatcccgaaacaattaccgattacgtcacactccagagagggagcgcctatggaggcgtgctgtccaacttctctggcaccgttaaatacagcgggtcctcttatccttttcccacgaccagcgagacacctcgggtggtctacaattcccgcaccgacaagccctggcctgtggccctgtatctcacaccggtgagctctgctggaggcgtcgccatcaaagctgggtccctgattgccgttcttatcctgagacagaccaacaattacaacagcgatgacttccagtttgtgtggaatatctacgcgaacaatgatgtggtcgtgcccacgggaggctgcgacgtttctgcccgggatgtgacagtcaccctccctgactatcccgggtccgtgcctattcccctgacagtttactgtgctaagagccaaaaccttggatattacctgtctggcaccaccgccgatgctggcaattccatcttcacaaacacggccagcttttccccggcgcagggggtgggagtccagctcacccgcaacggcacaattatccctgccaataacaccgtgtctctgggggctgtcggaacaagcgccgtgtccctgggcctcaccgctaattatgccagaacagggggacaggttacggccggcaacgtgcaaagcattatcggcgtcaccttcgtgtaccagcccggggacggaaatgctgatgttaccattacagtgaacggcaaagtcgtggcgaagtga

SEQ ID NO: 655 - RNA, 957 nt, synthetic construct
  misc_feature 1..957: note Artificial____MmIgK(1-20)_Ec(536)-FimH(22-300)_Linker-PGDGN _Ec(J96)-FimG(24-37) CDS opt5
  source 1..957: mol_type = other RNA
atggagaccgacacactgctcctgtgggtgcttctgctctgggtccccggcagcacggggttcgcctgcaagaccgctaacggaacagccatccctattggcgggggatccgcgaatgtttacgtgaacctggctccggccgtgaatgtcggccagaaccttgtggttgatctgtctacccaaatcttttgtcacaatgactatcccgaaacaattaccgattacgtgacactccagagagggagcgcctatggaggcgtcctgtcctctttcagcggcaccgtgaaatacaacgggtcctcttatccttttcccacgaccagcgagacacctcgggttgtgtacaattcccgcaccgacaagccctggcctgtcgctctgtatctcacaccggtgagctctgccggaggcgtggctatcaaagccgggtccctgattgcggtccttatcctgagacagaccaacaattacaacagcgatgacttccagtttgtttggaatatctacgccaacaatgatgtggtggtccccacgggaggctgcgacgtgtctgctcgggatgttacagtgaccctccctgactatcccgggtccgtccctattcccctgacagtgtactgtgccaagagccaaaaccttggatattacctgtctggcaccaccgctgatgccggcaattccatcttcacaaacacggcgagcttttccccggcccagggggttggagtgcagctcacccgcaacggcacaattatccctgctaataacaccgtctctctgggggccgtgggaacaagcgctgtctccctgggcctcaccgccaattatgccagaacagggggacaggtgacggctggcaacgttcaaagcattatcggcgtgaccttcgtctaccagcccggggacggaaatgcggatgtgaccattacagttaacggcaaagtggtcgccaagtga

SEQ ID NO: 656 - RNA, 981 nt, synthetic construct
  misc_feature 1..981: note Artificial____HsIgE(1-18)_Ec(J96)-FimH(22-300)_Linker-(G4S) 3_Ec(J96)-FimC(135-148) CDS opt5
  source 1..981: mol_type = other RNA
atggactggacctggatcctgttcctcgtggccgctgccacaagagtccacagctttgcgtgcaagacggctaacggcaccgccattcccatcgggggaggctccgccaatgtttacgtgaacctggctcctgtggtcaatgtggggcagaaccttgttgtggatctgtctacacaaattttctgtcataatgactatccggagaccatcacagattacgtcaccctccagcggggaagcgcctatggcggggtgctgtccaacttttctggaacagttaaatacagcggctcctcttatcccttccctaccacgagcgaaacaccccgcgtggtctacaattccagaaccgacaagccttggcccgtggctctttatctgacccctgtgagctctgccggcggggtcgcgattaaagccggatccctcatcgctgttctgatcctgcggcagacaaacaattacaacagcgatgactttcagttcgtgtggaatatttacgccaacaatgatgtggtcgtgccgaccggcgggtgcgacgtttctgctcgcgatgtgacggtcacactccccgactatcctggatccgtgcccatccctctgaccgtttactgtgccaagagccaaaaccttggctattacctgtctgggacaaccgcggatgccggaaattccatttttaccaacacagctagcttctcccccgcccagggcgtgggcgtccagctcacgagaaacgggaccatcattccggctaataacacagtgtctctgggagccgtcggcaccagcgccgtgtcccttgggctgacagctaattatgcgcggaccggaggccaggttacggccgggaacgtgcaaagcatcattggagtcacatttgtgtaccagggcggcgggggatctggcgggggaggctccgggggcggaggcagcaccgagaataccctccagctggctatcatctctcgcattaaatga

SEQ ID NO: 657 - RNA, 1404 nt, synthetic construct
  misc_feature 1..1404: note Artificial____LumSynth(1-154_C37A_N102D)_Linker(GGS)4-GGG_E c(J96)-FimH(22-300)_Linker-PGDGN_Ec(J96)-FimG(24-37) CDS opt5
  source 1..1404: mol_type = other RNA
atgcagatctacgagggcaagctgaccgccgaagggctcagattcggaattgtggctagccggtttaaccacgccctggtcgaccgccttgttgagggcgcgatcgatgctattgtgagacatgggggacgggaagaggacatcacactggtgcgcgtccccggctcctgggaaattcctgtggccgccggggagctcgctagaaaagaggatatcgacgccgttatcgctattggagtgctgatccggggcgccacgccgcacttcgattatattgcgtctgaagtcagcaagggccttgccgacctgtccctcgagctgcgcaaacccatcacctttggggtgattacagctgataccctggaacaagccatcgagagagctggaacaaagcatggcaataaagggtgggaggccgcgctctctgccattgaaatggctaacctgttcaagagccttcggggaggctccgggggatctggcggcagcgggggatccggcgggggatttgcctgcaagaccgctaatggcacagccatccctatcgggggaggcagcgccaacgtttacgtgaatctggctcccgtcgtgaacgtgggccagaatctcgtcgttgacctgtctacccagattttctgtcacaacgattatcctgagacgatcaccgactacgtgacacttcagcgcgggtccgcgtatggaggcgtgctgagcaatttttctgggaccgtcaaatactccggaagctcttatcccttccctacaacctccgaaacgccgagagtggtttacaacagccggacagataagccctggcctgtggccctctacctgacccccgtctcctctgctggcggggtggccattaaagccggcagcctgatcgctgttctcattctgcgccaaacaaataactataattccgacgattttcagttcgtgtggaacatctacgccaataacgacgtcgtggtccctaccggaggctgcgacgtgagcgcgagagatgttaccgtgacacttcccgactatccggggtctgtccctatccccctgacggtgtactgtgctaagtcccagaacctcggatattacctgagcggcaccacagccgatgccggaaattctatttttaccaacacagctagcttctcccctgcccagggggttggcgtgcaacttacccggaatgggacgatcattcccgctaacaatacagtctctctgggcgccgtgggaaccagcgcggtgtccctcggcctgaccgccaactatgctcgcacagggggacaggttaccgccggcaatgtccagagcatcattggggtgacatttgtgtaccagcccggagacggcaacgctgatgtcacgatcaccgtgaatgggaaagttgtggccaagtga

SEQ ID NO: 658 - RNA, 1422 nt, synthetic construct
  misc_feature 1..1422: note Artificial____HsIgE(1-18)_Ec(J96)-FimH(22-300)_Linker-PGDGN _Ec(J96)-FimG(24-37)_Linker-SGG_LumSynth(1-154_C37A_N102D) CDS opt5
  source 1..1422: mol_type = other RNA
atggactggacctggatcctgttcctcgtggccgctgccacaagagtccacagctttgcgtgcaagacggctaacggcaccgccattcccatcgggggaggctccgccaatgtttacgtgaacctggctcctgtggtcaatgtggggcagaaccttgttgtggatctgtctacacaaattttctgtcataatgactatccggagaccatcacagattacgtcaccctccagcggggaagcgcctatggcggggtgctgtccaacttttctggaacagttaaatacagcggctcctcttatcccttccctaccacgagcgaaacaccccgcgtggtctacaattccagaaccgacaagccttggcccgtggctctttatctgacccctgtgagctctgccggcggggtcgcgattaaagccggatccctcatcgctgttctgatcctgcggcagacaaacaattacaacagcgatgactttcagttcgtgtggaatatttacgccaacaatgatgtggtcgtgccgaccggcgggtgcgacgtttctgctcgcgatgtgacggtcacactccccgactatcctggatccgtgcccatccctctgaccgtttactgtgccaagagccaaaaccttggctattacctgtctgggacaaccgcggatgccggaaattccatttttaccaacacagctagcttctcccccgcccagggcgtgggcgtccagctcacgagaaacgggaccatcattccggctaataacacagtgtctctgggagccgtcggcaccagcgccgtgtcccttgggctgacagctaattatgcgcggaccggaggccaggttacggccgggaacgtgcaaagcatcattggagtcacatttgtgtaccagcctggcgacggcaatgctgatgttaccatcaccgtgaacgggaaagtcgtggccaagtctggaggcatgcagatctatgaggggaagctcacagccgaaggactgcgcttcggcattgtggcttccagatttaatcacgccctggttgaccggctcgtcgagggggcgatcgacgctattgtgcgccatggcggaagagaagaggatatcaccctggtgcgggtccccggcagctgggagattcctgtggccgccggggaacttgctcgcaaagaggacatcgatgccgttatcgctattggagtgctgatcagaggcgccacaccccacttcgactacattgcgtctgaagtcagcaaggggctcgccgatctgtcccttgagctgcggaaacccatcacgtttggagtgattaccgctgacacactcgagcaggccatcgaacgcgctggcaccaagcatgggaacaaaggctgggaggccgcgctgtctgccatcgaaatggctaatctgttcaagagcctcagatga

SEQ ID NO: 659 - RNA, 1449 nt, synthetic construct
  misc_feature 1..1449: note Artificial____HsIgE(1-18)_Ec(J96)-FimH(22-300)_Linker-PGDGN _Ec(J96)-FimG(24-37)_Linker-SGG_Ferritin(5-167_N19Q) CDS opt5
  source 1..1449: mol_type = other RNA
atggactggacctggatcctgttcctcgtggccgctgccacaagagtccacagctttgcgtgcaagacggctaacggcaccgccattcccatcgggggaggctccgccaatgtttacgtgaacctggctcctgtggtcaatgtggggcagaaccttgttgtggatctgtctacacaaattttctgtcataatgactatccggagaccatcacagattacgtcaccctccagcggggaagcgcctatggcggggtgctgtccaacttttctggaacagttaaatacagcggctcctcttatcccttccctaccacgagcgaaacaccccgcgtggtctacaattccagaaccgacaagccttggcccgtggctctttatctgacccctgtgagctctgccggcggggtcgcgattaaagccggatccctcatcgctgttctgatcctgcggcagacaaacaattacaacagcgatgactttcagttcgtgtggaatatttacgccaacaatgatgtggtcgtgccgaccggcgggtgcgacgtttctgctcgcgatgtgacggtcacactccccgactatcctggatccgtgcccatccctctgaccgtttactgtgccaagagccaaaaccttggctattacctgtctgggacaaccgcggatgccggaaattccatttttaccaacacagctagcttctcccccgcccagggcgtgggcgtccagctcacgagaaacgggaccatcattccggctaataacacagtgtctctgggagccgtcggcaccagcgccgtgtcccttgggctgacagctaattatgcgcggaccggaggccaggttacggccgggaacgtgcaaagcatcattggagtcacatttgtgtaccagcctggcgacggcaatgctgatgttaccatcaccgtgaacgggaaagtcgtggccaagtctggaggcgacatcattaagctcctgaatgaacaggtgaacaaagagatgcagtccagcaatctgtatatgtctatgagctcctggtgctacacacactctctcgacggggccggactgttcctttttgatcatgctgccgaggaatacgagcacgcgaagaaactgatcattttcctcaacgagaataacgttcccgtccaactgaccagcatctccgctcctgaacataagtttgagggccttacacagattttccagaaagcctatgaacacgagcaacacatcagcgagtctatcaataacattgtggaccatgccatcaagtccaaggatcacgctacgttcaattttctgcagtggtacgtggccgaacagcatgaggaagaggtcctcttcaaagacattctggataagatcgaactgattgggaacgagaaccacggcctctatctggctgaccagtacgtgaaaggaatcgccaagagccgcaaatcttga

SEQ ID NO: 660 - RNA, 1479 nt, synthetic construct
  misc_feature 1..1479: note Artificial____MmIgK(1-20)_Ec(J96)-FimH(22-300)_Linker-PGDGN _Ec(J96)-FimG(24-37)_Linker-(GGS)4_Ferritin(5-166) CDS opt5
  source 1..1479: mol_type = other RNA
atggagaccgacacactgctcctgtgggtgcttctgctctgggtccccggcagcacggggttcgcctgcaagaccgctaacggaacagccatccctattggcgggggatccgcgaatgtttacgtgaacctggctccggtggtcaatgtgggccagaaccttgttgtggatctgtctacccaaatcttttgtcacaatgactatcccgaaacaattaccgattacgtcacactccagagagggagcgcctatggaggcgtgctgtccaacttctctggcaccgttaaatacagcgggtcctcttatccttttcccacgaccagcgagacacctcgggtggtctacaattcccgcaccgacaagccctggcctgtggccctgtatctcacaccggtgagctctgctggaggcgtcgccatcaaagctgggtccctgattgccgttcttatcctgagacagaccaacaattacaacagcgatgacttccagtttgtgtggaatatctacgcgaacaatgatgtggtcgtgcccacgggaggctgcgacgtttctgcccgggatgtgacagtcaccctccctgactatcccgggtccgtgcctattcccctgacagtttactgtgctaagagccaaaaccttggatattacctgtctggcaccaccgccgatgctggcaattccatcttcacaaacacggccagcttttccccggcgcagggggtgggagtccagctcacccgcaacggcacaattatccctgccaataacaccgtgtctctgggggctgtcggaacaagcgccgtgtccctgggcctcaccgctaattatgccagaacagggggacaggttacggccggcaacgtgcaaagcattatcggcgtcaccttcgtgtaccagcccggggacggaaatgctgatgttaccattacagtgaacggcaaagtcgtggcgaaagggggatctggcgggtccggcggaagcggcgggtctgacatcatcaagctgcttaatgaacaggtgaacaaggagatgaatagctccaacctgtatatgtctatgagctcctggtgctacacccatagcctcgacggagccggcctgtttcttttcgatcacgctgccgaagagtacgagcatgccaagaaactgattatctttctcaatgaaaacaatgttcctgtccagctgacatctatttccgctcccgagcacaagttcgaagggctgacgcaaatctttcagaaagcctatgagcatgagcagcacattagcgaatctatcaacaatatcgtggaccacgcgattaagtccaaggatcatgctaccttcaacttcctccaatggtacgtggccgagcagcacgaagaggaagtcctgtttaaagacatccttgataagattgagctgatcggaaacgagaatcatggcctctatctggccgaccagtacgtgaaagggattgctaagagccggaaatga

SEQ ID NO: 661 - RNA, 1122 nt, synthetic construct
  misc_feature 1..1122: note Artificial____HsIgE(1-18)_Ec(J96)-FimH(22-300)_Linker-PGDGN _Ec(J96)-FimG(24-37)_TMdomain-HA(510-566) CDS opt5
  source 1..1122: mol_type = other RNA
atggactggacctggatcctgttcctcgtggccgctgccacaagagtccacagctttgcgtgcaagacggctaacggcaccgccattcccatcgggggaggctccgccaatgtttacgtgaacctggctcctgtggtcaatgtggggcagaaccttgttgtggatctgtctacacaaattttctgtcataatgactatccggagaccatcacagattacgtcaccctccagcggggaagcgcctatggcggggtgctgtccaacttttctggaacagttaaatacagcggctcctcttatcccttccctaccacgagcgaaacaccccgcgtggtctacaattccagaaccgacaagccttggcccgtggctctttatctgacccctgtgagctctgccggcggggtcgcgattaaagccggatccctcatcgctgttctgatcctgcggcagacaaacaattacaacagcgatgactttcagttcgtgtggaatatttacgccaacaatgatgtggtcgtgccgaccggcgggtgcgacgtttctgctcgcgatgtgacggtcacactccccgactatcctggatccgtgcccatccctctgaccgtttactgtgccaagagccaaaaccttggctattacctgtctgggacaaccgcggatgccggaaattccatttttaccaacacagctagcttctcccccgcccagggcgtgggcgtccagctcacgagaaacgggaccatcattccggctaataacacagtgtctctgggagccgtcggcaccagcgccgtgtcccttgggctgacagctaattatgcgcggaccggaggccaggttacggccgggaacgtgcaaagcatcattggagtcacatttgtgtaccagcctggcgacggcaatgctgatgttaccatcaccgtgaacgggaaagtcgtggccaaggccaagctcaatcgcgaggaaatcgacggagtgaaactggagtctacaagaatttatcagatcctggctatttactccaccgttgccagctctctcgtcctggtggtgagccttggcgcgatctccttctggatgtgctctaacgggagcctgcagtgtcggatttgcatctga

SEQ ID NO: 662 - RNA, 1455 nt, synthetic construct
  misc_feature 1..1455: note Artificial____HsIgE(1-18)_LumSynth(1-154_C37A_N102D)_Linker (GGS)4-GGG_Ec(J96)-FimH(22-300)_Linker-PGDGN_Ec(J96)-FimG(2 4-37) CDS opt5
  source 1..1455: mol_type = other RNA
atggactggacctggatcctgttcctcgtggccgctgccacaagagtccacagccagatttacgagggcaagctgacggcggaagggcttcggtttggaatcgttgcttcccgcttcaaccatgccctggtggatagactcgtggagggcgccattgacgctatcgtccggcacgggggacgcgaagaggatattaccctggtgagagttcccggctcttgggaaatccctgtggccgctggggagcttgcccggaaagaggacatcgatgcggtcattgccatcggagtgctgattcgcggcgctacaccgcattttgactatatcgccagcgaagtttccaagggcctcgctgatctgtctctggagctcagaaaacccattaccttcggggtgatcacagccgacaccctggaacaagcgattgagcgggccggaacaaagcacggcaataaagggtgggaggctgcccttagcgctatcgaaatggccaacctgtttaagtccctccgcggaggctctgggggaagcggcggctccgggggaagcggcgggggattcgcctgcaagaccgctaatggcacggcgatccctattgggggaggctctgccaacgtctacgtgaatctggctcccgtggtcaacgttggccagaatcttgtggtggatctgtccacccagatcttttgtcataacgactatcctgagacaattaccgattacgtcacactccagagagggagcgcctatggaggcgtgctgtctaatttctccgggaccgttaaatacagcggatcttcctatccctttcctacgacaagcgaaaccccgcgggtggtctacaactcccgcacagacaagccctggcctgtggccctgtacctcacccccgtttctagcgctggcggggtggccatcaaagcgggctccctgattgctgtccttatcctgagacaaaccaataactataatagcgatgacttccagtttgtgtggaacatctacgccaataacgacgtcgtggttcctacaggaggctgcgatgtgtctgcccgggacgtcacggtgaccctccccgattatccggggtccgttcctattcccctgacagtgtactgtgctaagagccagaaccttggatattacctgtctggcaccacagccgacgctgggaatagcatcttcaccaacacggcctccttttctcctgcgcagggagtcggcgtgcaactcacacgcaatgggaccattatccccgccaacaataccgtgagcctgggcgctgttggaacatccgccgtcagcctgggcctcaccgctaactatgccagaacagggggacaggtgacggcgggcaatgtgcagtctattatcggggtcaccttcgtgtaccagcccggagatggcaacgccgacgttacaatcaccgtgaatgggaaagtcgtggctaagtga

SEQ ID NO: 663 - RNA, 1422 nt, synthetic construct
  misc_feature 1..1422: note Artificial____HsIgE(1-18)_Ec(J96)-FimH(22-300_N28S_N91S_N24 9Q)_Linker-PGDGN_Ec(J96)-FimG(24-37)_Linker-SGG_LumSynth(1- 154_C37A_N102D) CDS opt5
  source 1..1422: mol_type = other RNA
atggactggacctggatcctgttcctcgtggccgctgccacaagagtccacagctttgcgtgcaagacggcttccggcaccgccattcccatcgggggaggctctgccaacgtttacgtgaatctggctcctgtggtcaacgtggggcagaatcttgttgtggatctgagcacacaaattttctgtcataacgactatccggagaccatcacagattacgtcaccctccagcggggatccgcctatggcggggtgctgtctagcttttccggaacagttaaatactctggcagctcctatcccttccctaccacgagcgaaacaccccgcgtggtctacaattctagaaccgacaagccttggcccgtggctctttatctgacccctgtgtccagcgccggcggggtcgcgattaaagccggatctctcatcgctgttctgatcctgcggcagacaaacaattacaactccgatgactttcagttcgtgtggaatatttacgccaacaatgatgtggtcgtgccgaccggcgggtgcgacgttagcgctcgcgatgtgacggtcacactccccgactatcctggatctgtgcccatccctctgaccgtttactgtgccaagtcccaaaaccttggctattacctgagcgggacaaccgcggatgccggaaattccatttttaccaacacagcttctttcagccccgcccagggcgtgggcgtccagctcacgagacaggggaccatcattccggctaataacacagtgtccctgggagccgtcggcaccagcgccgtgtctcttgggctgacagctaactatgcgcggaccggaggccaagttacggccgggaatgtgcagtccatcattggagtcacatttgtgtaccagcctggcgacggcaacgctgatgttaccatcaccgtgaatgggaaagtcgtggccaagagcggaggcatgcagatctatgaggggaagctcacagccgaaggactgcgcttcggcattgtggcttctagatttaaccacgccctggttgaccggctcgtcgagggggcgatcgacgctattgtgcgccatggcggaagagaagaggatatcaccctggtgcgggtccccggcagctgggagattcctgtggccgccggggaacttgctcgcaaagaggacatcgatgccgttatcgctattggagtgctgatcagaggcgccacaccccacttcgactacattgcgtccgaagtctctaaggggctcgccgatctgagccttgagctgcggaaacccatcacgtttggagtgattaccgctgacacactcgagcaagccatcgaacgcgctggcaccaagcatgggaataaaggctgggaggccgcgctgtccgccatcgaaatggctaacctgttcaagagcctcagatga

SEQ ID NO: 664 - RNA, 1422 nt, synthetic construct
  misc_feature 1..1422: note Artificial____HsIgE(1-18)_Ec(J96)-FimH(22-300_N28S_N91S_N24 9Q_N256D)_Linker-PGDGN_Ec(J96)-FimG(24-37)_Linker-SGG_LumSy nth(1-154_C37A_N102D) CDS opt5
  source 1..1422: mol_type = other RNA
atggactggacctggatcctgttcctcgtggccgctgccacaagagtccacagctttgcgtgcaagacggcttccggcaccgccattcccatcgggggaggctctgccaacgtttacgtgaatctggctcctgtggtcaacgtggggcagaatcttgttgtggatctgagcacacaaattttctgtcataacgactatccggagaccatcacagattacgtcaccctccagcggggatccgcctatggcggggtgctgtctagcttttccggaacagttaaatactctggcagctcctatcccttccctaccacgagcgaaacaccccgcgtggtctacaattctagaaccgacaagccttggcccgtggctctttatctgacccctgtgtccagcgccggcggggtcgcgattaaagccggatctctcatcgctgttctgatcctgcggcagacaaacaattacaactccgatgactttcagttcgtgtggaatatttacgccaacaatgatgtggtcgtgccgaccggcgggtgcgacgttagcgctcgcgatgtgacggtcacactccccgactatcctggatctgtgcccatccctctgaccgtttactgtgccaagtcccaaaaccttggctattacctgagcgggacaaccgcggatgccggaaattccatttttaccaacacagcttctttcagccccgcccagggcgtgggcgtccagctcacgagacaggggaccatcattccggctgacaatacagtgtccctgggagccgtcggcaccagcgccgtgtctcttgggctgacagctaactatgcgcggaccggaggccaagttacggccgggaacgtgcagtccatcattggagtcacatttgtgtaccagcctggcgatggcaatgctgacgttaccatcaccgtgaacgggaaagtcgtggccaagagcggaggcatgcagatctatgaggggaagctcacagccgaaggactgcgcttcggcattgtggcttctagatttaatcacgccctggttgaccggctcgtcgagggggcgatcgatgctattgtgcgccatggcggaagagaagaggacatcaccctggtgcgggtccccggcagctgggagattcctgtggccgccggggaacttgctcgcaaagaggatatcgacgccgttatcgctattggagtgctgatcagaggcgccacaccccacttcgattacattgcgtccgaagtctctaaggggctcgccgacctgagccttgagctgcggaaacccatcacgtttggagtgattaccgctgatacactcgagcaagccatcgaacgcgctggcaccaagcatgggaacaaaggctgggaggccgcgctgtccgccatcgaaatggctaatctgttcaagagcctcagatga

SEQ ID NO: 665 - RNA, 1422 nt, synthetic construct
  misc_feature 1..1422: note Artificial____HsIgE(1-18)_Ec(J96)-FimH(22-300_N28S_V48C_L55 C_N91S_N249Q)_Linker-PGDGN_Ec(J96)-FimG(24-37)_Linker-SGG_L umSynth(1-154_C37A_N102D) CDS opt5
  source 1..1422: mol_type = other RNA
atggactggacctggatcctgttcctcgtggccgctgccacaagagtccacagctttgcgtgcaagacggcttccggcaccgccattcccatcgggggaggctctgccaacgtttacgtgaatctggctccttgtgtgaacgtcgggcagaattgcgtggttgatcttagcacacaaattttctgtcataacgactatccggagaccatcacagattacgtgaccctgcagcggggatccgcctatggcggggtcctctctagcttttccggaacagtgaaatactctggcagctcctatcccttccctaccacgagcgaaacaccccgcgttgtgtacaattctagaaccgacaagccttggcccgtcgctctgtatcttacccctgtgtccagcgccggcggggtggcgattaaagccggatctctgatcgctgtcctcatcctgcggcagacaaacaattacaactccgatgactttcagttcgtttggaatatttacgccaacaatgatgtggtggtcccgaccggcgggtgcgacgtgagcgctcgcgatgttacggtgacactgcccgactatcctggatctgtccccatccctctcaccgtgtactgtgccaagtcccaaaacctgggctattaccttagcgggacaaccgcggatgccggaaattccatttttaccaacacagcttctttcagccccgcccagggcgttggcgtgcagctgacgagacaggggaccatcattccggctaataacacagtctccctcggagccgtgggcaccagcgccgtctctctggggcttacagctaactatgcgcggaccggaggccaagtgacggccgggaatgttcagtccatcattggagtgacatttgtctaccagcctggcgacggcaacgctgatgtgaccatcaccgttaatgggaaagtggtcgccaagagcggaggcatgcagatctatgaggggaagctgacagccgaaggactccgcttcggcattgtggcttctagatttaaccacgccctggtggaccggctggttgagggggcgatcgacgctattgtccgccatggcggaagagaagaggatatcaccctcgtgcgggtgcccggcagctgggagattcctgtcgccgccggggaactggctcgcaaagaggacatcgatgccgtgatcgctattggagttcttatcagaggcgccacaccccacttcgactacattgcgtccgaagtgtctaaggggctggccgatctcagcctggagcttcggaaacccatcacgtttggagtcattaccgctgacacactggagcaagccatcgaacgcgctggcaccaagcatgggaataaaggctgggaggccgcgctctccgccatcgaaatggctaacctgttcaagagcctgagatga

SEQ ID NO: 666 - RNA, 1422 nt, synthetic construct
  misc_feature 1..1422: note Artificial____HsIgE(1-18)_Ec(J96)-FimH(22-300_F165V)_Linker -PGDGN_Ec(J96)-FimG(24-37)_Linker-SGG_LumSynth(1-154_C37A_N 102D) CDS opt5
  source 1..1422: mol_type = other RNA
atggactggacctggatcctgttcctcgtggccgctgccacaagagtccacagctttgcgtgcaagacggctaacggcaccgccattcccatcgggggaggctccgccaatgtttacgtgaacctggctcctgtggtcaatgtggggcagaaccttgttgtggatctgtctacacaaattttctgtcataatgactatccggagaccatcacagattacgtcaccctccagcggggaagcgcctatggcggggtgctgtccaacttttctggaacagttaaatacagcggctcctcttatcccttccctaccacgagcgaaacaccccgcgtggtctacaattccagaaccgacaagccttggcccgtggctctttatctgacccctgtgagctctgccggcggggtcgcgattaaagccggatccctcatcgctgttctgatcctgcggcagacaaacaattacaacagcgatgactttcaggtggtgtggaatatttacgccaacaatgatgtcgtggttccgaccggcgggtgcgacgtgtctgctcgcgatgtcacggtgacactccccgactatcctggatccgttcccatccctctgaccgtgtactgtgccaagagccaaaaccttggctattacctgtctgggacaaccgcggatgccggaaattccattttcaccaacacagctagcttttcccccgcccagggcgtcggcgtgcagctcacgagaaacgggaccatcattccggctaataacacagtctctctgggagccgtgggcaccagcgccgtttcccttgggctgacagctaattatgcgcggaccggaggccaggtgacggccgggaacgtccaaagcatcattggagtgacattcgtttaccagcctggcgacggcaatgctgatgtgaccatcaccgtcaacgggaaagtggtggccaagtctggaggcatgcagatctatgaggggaagctcacagccgaaggactgcgctttggcattgttgcttccagattcaatcacgccctggtcgaccggctcgtggagggggcgatcgacgctattgtgcgccatggcggaagagaagaggatatcaccctggtccgggtgcccggcagctgggagattcctgttgccgccggggaacttgctcgcaaagaggacatcgatgccgtgatcgctattggagtcctgatcagaggcgccacaccccactttgactacattgcgtctgaagtgagcaaggggctcgccgatctgtcccttgagctgcggaaacccatcacgttcggagttattaccgctgacacactcgagcaggccatcgaacgcgctggcaccaagcatgggaacaaaggctgggaggccgcgctgtctgccatcgaaatggctaatctgtttaagagcctcagatga

SEQ ID NO: 667 - RNA, 1449 nt, synthetic construct
  misc_feature 1..1449: note Artificial____HsIgE(1-18)_Ec(J96)-FimH(22-300_N28S_N91S_N24 9Q)_Linker-PGDGN_Ec(J96)-FimG(24-37)_Linker-SGG_Ferritin(5- 167_N19Q) CDS opt5
  source 1..1449: mol_type = other RNA
atggactggacctggatcctgttcctcgtggccgctgccacaagagtccacagctttgcgtgcaagacggcttccggcaccgccattcccatcgggggaggctctgccaacgtttacgtgaatctggctcctgtggtcaacgtggggcagaatcttgttgtggatctgagcacacaaattttctgtcataacgactatccggagaccatcacagattacgtcaccctccagcggggatccgcctatggcggggtgctgtctagcttttccggaacagttaaatactctggcagctcctatcccttccctaccacgagcgaaacaccccgcgtggtctacaattctagaaccgacaagccttggcccgtggctctttatctgacccctgtgtccagcgccggcggggtcgcgattaaagccggatctctcatcgctgttctgatcctgcggcagacaaacaattacaactccgatgactttcagttcgtgtggaatatttacgccaacaatgatgtggtcgtgccgaccggcgggtgcgacgttagcgctcgcgatgtgacggtcacactccccgactatcctggatctgtgcccatccctctgaccgtttactgtgccaagtcccaaaaccttggctattacctgagcgggacaaccgcggatgccggaaattccatttttaccaacacagcttctttcagccccgcccagggcgtgggcgtccagctcacgagacaggggaccatcattccggctaataacacagtgtccctgggagccgtcggcaccagcgccgtgtctcttgggctgacagctaactatgcgcggaccggaggccaagttacggccgggaatgtgcagtccatcattggagtcacatttgtgtaccagcctggcgacggcaacgctgatgttaccatcaccgtgaatgggaaagtcgtggccaagagcggaggcgacatcattaagctcctgaacgaacaggtgaataaagagatgcaatctagcaacctgtatatgtccatgtctagctggtgctacacacactccctcgacggggccggactgttcctttttgatcatgctgccgaggaatacgagcacgcgaagaaactgatcattttcctcaatgagaacaatgttcccgtccagctgaccagcatctctgctcctgaacataagtttgagggccttacacagattttccaaaaagcctatgaacacgagcagcacatctccgagagcatcaacaatattgtggaccatgccatcaagtctaaggatcacgctacgttcaactttctgcagtggtacgtggccgaacagcatgaggaagaggtcctcttcaaagacattctggataagatcgaactgattgggaatgagaaccacggcctctatctggctgaccaatacgtgaaaggaatcgccaagtcccgcaaaagctga

SEQ ID NO: 668 - RNA, 1449 nt, synthetic construct
  misc_feature 1..1449: note Artificial____HsIgE(1-18)_Ec(J96)-FimH(22-300_N28S_N91S_N24 9Q_N256D)_Linker-PGDGN_Ec(J96)-FimG(24-37)_Linker-SGG_Ferri tin(5-167_N19Q) CDS opt5
  source 1..1449: mol_type = other RNA
atggactggacctggatcctgttcctcgtggccgctgccacaagagtccacagctttgcgtgcaagacggcttccggcaccgccattcccatcgggggaggctctgccaacgtttacgtgaatctggctcctgtggtcaacgtggggcagaatcttgttgtggatctgagcacacaaattttctgtcataacgactatccggagaccatcacagattacgtcaccctccagcggggatccgcctatggcggggtgctgtctagcttttccggaacagttaaatactctggcagctcctatcccttccctaccacgagcgaaacaccccgcgtggtctacaattctagaaccgacaagccttggcccgtggctctttatctgacccctgtgtccagcgccggcggggtcgcgattaaagccggatctctcatcgctgttctgatcctgcggcagacaaacaattacaactccgatgactttcagttcgtgtggaatatttacgccaacaatgatgtggtcgtgccgaccggcgggtgcgacgttagcgctcgcgatgtgacggtcacactccccgactatcctggatctgtgcccatccctctgaccgtttactgtgccaagtcccaaaaccttggctattacctgagcgggacaaccgcggatgccggaaattccatttttaccaacacagcttctttcagccccgcccagggcgtgggcgtccagctcacgagacaggggaccatcattccggctgacaatacagtgtccctgggagccgtcggcaccagcgccgtgtctcttgggctgacagctaactatgcgcggaccggaggccaagttacggccgggaacgtgcagtccatcattggagtcacatttgtgtaccagcctggcgatggcaatgctgacgttaccatcaccgtgaacgggaaagtcgtggccaagagcggaggcgacatcattaagctcctgaatgaacaggtgaacaaagagatgcaatctagcaatctgtatatgtccatgtctagctggtgctacacacactccctcgatggggccggactgttcctttttgaccatgctgccgaggaatacgagcacgcgaagaaactgatcattttcctcaacgagaataacgttcccgtccagctgaccagcatctctgctcctgaacataagtttgagggccttacacagattttccaaaaagcctatgaacacgagcagcacatctccgagagcatcaataacattgtggatcatgccatcaagtctaaggaccacgctacgttcaattttctgcagtggtacgtggccgaacagcatgaggaagaggtcctcttcaaagatattctggacaagatcgaactgattgggaacgagaatcacggcctctatctggctgatcaatacgtgaaaggaatcgccaagtcccgcaaaagctga

SEQ ID NO: 669 - RNA, 1449 nt, synthetic construct
  misc_feature 1..1449: note Artificial____HsIgE(1-18)_Ec(J96)-FimH(22-300_N28S_V48C_L55 C_N91S_N249Q)_Linker-PGDGN_Ec(J96)-FimG(24-37)_Linker-SGG_F erritin(5-167_N19Q) CDS opt5
  source 1..1449: mol_type = other RNA
atggactggacctggatcctgttcctcgtggccgctgccacaagagtccacagctttgcgtgcaagacggcttccggcaccgccattcccatcgggggaggctctgccaacgtttacgtgaatctggctccttgtgtgaacgtcgggcagaattgcgtggttgatcttagcacacaaattttctgtcataacgactatccggagaccatcacagattacgtgaccctgcagcggggatccgcctatggcggggtcctctctagcttttccggaacagtgaaatactctggcagctcctatcccttccctaccacgagcgaaacaccccgcgttgtgtacaattctagaaccgacaagccttggcccgtcgctctgtatcttacccctgtgtccagcgccggcggggtggcgattaaagccggatctctgatcgctgtcctcatcctgcggcagacaaacaattacaactccgatgactttcagttcgtttggaatatttacgccaacaatgatgtggtggtcccgaccggcgggtgcgacgtgagcgctcgcgatgttacggtgacactgcccgactatcctggatctgtccccatccctctcaccgtgtactgtgccaagtcccaaaacctgggctattaccttagcgggacaaccgcggatgccggaaattccatttttaccaacacagcttctttcagccccgcccagggcgttggcgtgcagctgacgagacaggggaccatcattccggctaataacacagtctccctcggagccgtgggcaccagcgccgtctctctggggcttacagctaactatgcgcggaccggaggccaagtgacggccgggaatgttcagtccatcattggagtgacatttgtctaccagcctggcgacggcaacgctgatgtgaccatcaccgttaatgggaaagtggtcgccaagagcggaggcgacatcattaagctgctcaacgaacaggtgaataaagagatgcaatctagcaacctgtatatgtccatgtctagctggtgctacacacactccctggacggggccggactcttcctgtttgatcatgctgccgaggaatacgagcacgcgaagaaacttatcattttcctgaatgagaacaatgtgcccgttcagctcaccagcatctctgctcctgaacataagtttgagggcctgacacagattttccaaaaagcctatgaacacgagcagcacatctccgagagcatcaacaatattgtcgaccatgccatcaagtctaaggatcacgctacgttcaactttcttcagtggtacgtggccgaacagcatgaggaagaggtgctgttcaaagacattctcgataagatcgaactgattgggaatgagaaccacggcctgtatctcgctgaccaatacgtcaaaggaatcgccaagtcccgcaaaagctga

SEQ ID NO: 670 - RNA, 1449 nt, synthetic construct
  misc_feature 1..1449: note Artificial____HsIgE(1-18)_Ec(J96)-FimH(22-300_F165V)_Linker -PGDGN_Ec(J96)-FimG(24-37)_Linker-SGG_Ferritin(5-167_N19Q) CDS opt5
  source 1..1449: mol_type = other RNA
atggactggacctggatcctgttcctcgtggccgctgccacaagagtccacagctttgcgtgcaagacggctaacggcaccgccattcccatcgggggaggctccgccaatgtttacgtgaacctggctcctgtggtcaatgtggggcagaaccttgttgtggatctgtctacacaaattttctgtcataatgactatccggagaccatcacagattacgtcaccctccagcggggaagcgcctatggcggggtgctgtccaacttttctggaacagttaaatacagcggctcctcttatcccttccctaccacgagcgaaacaccccgcgtggtctacaattccagaaccgacaagccttggcccgtggctctttatctgacccctgtgagctctgccggcggggtcgcgattaaagccggatccctcatcgctgttctgatcctgcggcagacaaacaattacaacagcgatgactttcaggtggtgtggaatatttacgccaacaatgatgtcgtggttccgaccggcgggtgcgacgtgtctgctcgcgatgtcacggtgacactccccgactatcctggatccgttcccatccctctgaccgtgtactgtgccaagagccaaaaccttggctattacctgtctgggacaaccgcggatgccggaaattccattttcaccaacacagctagcttttcccccgcccagggcgtcggcgtgcagctcacgagaaacgggaccatcattccggctaataacacagtctctctgggagccgtgggcaccagcgccgtttcccttgggctgacagctaattatgcgcggaccggaggccaggtgacggccgggaacgtccaaagcatcattggagtgacattcgtttaccagcctggcgacggcaatgctgatgtgaccatcaccgtcaacgggaaagtggtggccaagtctggaggcgacatcattaagctcctgaatgagcaggttaacaaagaaatgcagtccagcaatctgtatatgtctatgagctcctggtgctacacacactctctcgacggggccggactgtttcttttcgatcatgctgccgaggaatacgagcacgcgaagaaactgatcatttttctcaacgagaataacgtccccgtgcaactgaccagcatctccgctcctgaacataagttcgagggccttacacagatttttcagaaagcctatgaacacgagcaacacatcagcgagtctatcaataacattgtggaccatgccatcaagtccaaggatcacgctacgttcaatttcctgcagtggtacgtcgccgaacagcatgaggaagaggtgctctttaaagacattctggataagatcgaactgattgggaacgagaaccacggcctctatctggctgaccagtacgttaaaggaatcgccaagagccgcaaatcttga

SEQ ID NO: 671 - RNA, 998 nt, synthetic construct
  misc_feature 1..998: note Artificial____Ec(J96)-FimC(1-36)_Ec(J96)-FimC(37-241) mRNA opt1
  source 1..998: mol_type = other RNA
aggagagtcccgcagtcggcgtccagcggctctgcttgttcgtgtgtgtgtcgttgcaggccttattcaagcttaccatgagcaacaagaacgtgaacgtccgcaagtcccaggagatcaccttctgcctgctcgccggcatcctgatgttcatggccatgatggtggcggggcgggccgaggccggcgtggccctgggggccacccgcgtcatctaccccgcgggccagaagcaggtccagctcgccgtgaccaacaacgacgagaacagcacgtacctgatccagtcctgggtggagaacgccgacggggtgaaggacggccggttcatcgtgaccccgcccctgttcgccatgaaggggaagaaggagaacaccctccgcatcctggacgccaccaacaaccagctgccccaggaccgggagagcctcttctggatgaacgtcaaggcgatcccctccatggacaagagcaagctgacggagaacaccctgcagctcgccatcatctcccgcatcaagctgtactaccggccggccaagctggccctcccgcccgaccaggcggccgagaagctgcgcttccggcgcagcgccaactccctgaccctcatcaaccccaccccctactacctgacggtgaccgagctgaacgccggcacccgggtgctcgagaacgccctggtcccgcccatgggcgagagcaccgtgaagctgccctccgacgcggggagcaacatcacgtaccgcaccatcaacgactacggcgccctcacccccaagatgaccggggtgatggagtgaggactagtccctgttcccagagcccacttttttttctttttttgaaataaaatagcctgtctttcagatctcaaaggctcttttcagagccaccaaaaaaaaaaaaaaaaaaaaaaaaaaaaaaaaaaaaaaaaaaaaaaaaaaaaaaaaaaaaaaaaaaaaaaaaaaaaaaaaaaaaaaaaaaaaaaaaaaaaa

SEQ ID NO: 672 - RNA, 944 nt, synthetic construct
  misc_feature 1..944: note = Artificial____HsIgE(1-18)_Ec(J96)-FimC(37-241) mRNA opt1
  source 1..944: mol_type = other RNA
aggagagtcccgcagtcggcgtccagcggctctgcttgttcgtgtgtgtgtcgttgcaggccttattcaagcttaccatggactggacctggatcctgttcctcgtggccgccgcgacccgcgtccacagcggcgtggccctgggggccacccgcgtcatctaccccgcgggccagaagcaggtccagctcgccgtgaccaacaacgacgagaacagcacgtacctgatccagtcctgggtggagaacgccgacggggtgaaggacggccggttcatcgtgaccccgcccctgttcgccatgaaggggaagaaggagaacaccctccgcatcctggacgccaccaacaaccagctgccccaggaccgggagagcctcttctggatgaacgtcaaggcgatcccctccatggacaagagcaagctgacggagaacaccctgcagctcgccatcatctcccgcatcaagctgtactaccggccggccaagctggccctcccgcccgaccaggcggccgagaagctgcgcttccggcgcagcgccaactccctgaccctcatcaaccccaccccctactacctgacggtgaccgagctgaacgccggcacccgggtgctcgagaacgccctggtcccgcccatgggcgagagcaccgtgaagctgccctccgacgcggggagcaacatcacgtaccgcaccatcaacgactacggcgccctcacccccaagatgaccggggtgatggagtgaggactagtccctgttcccagagcccacttttttttctttttttgaaataaaatagcctgtctttcagatctcaaaggctcttttcagagccaccaaaaaaaaaaaaaaaaaaaaaaaaaaaaaaaaaaaaaaaaaaaaaaaaaaaaaaaaaaaaaaaaaaaaaaaaaaaaaaaaaaaaaaaaaaaaaaaaaaaaa

SEQ ID NO: 673 - RNA, 1175 nt, synthetic construct
  misc_feature 1..1175: note Artificial____Ec(J96)-FimH(1-21)_Ec(J96)-FimH(22-300) mRNA opt1
  source 1..1175: mol_type = other RNA
aggagagtcccgcagtcggcgtccagcggctctgcttgttcgtgtgtgtgtcgttgcaggccttattcaagcttaccatgaagcgcgtgatcaccctgttcgccgtcctcctgatgggctggagcgtgaacgcctggtccttcgcctgcaagaccgccaacggcaccgcgatccccatcgggggcgggagcgccaacgtgtacgtcaacctggccccggtggtgaacgtcggccagaacctcgtggtggacctgtccacgcagatcttctgccacaacgactaccccgagaccatcaccgactacgtcaccctgcagcgcgggagcgcctacggcggcgtgctctccaacttcagcgggacggtgaagtactccggcagctcctaccccttccccaccaccagcgagaccccgcgggtcgtgtacaactcccgcacggacaagccctggcccgtggccctgtacctgacccccgtcagctccgccgggggcgtggcgatcaaggccgggagcctcatcgccgtgctgatcctgcggcagaccaacaactacaactccgacgacttccagttcgtctggaacatctacgcgaacaacgacgtggtggtcccgaccggcggctgcgacgtgagcgcccgcgacgtgacggtcaccctccccgactaccccgggtccgtgcccatcccgctgaccgtgtactgcgccaagagccagaacctgggctactacctctccgggaccacggccgacgccggcaacagcatcttcaccaacaccgcgtccttcagccccgcccagggcgtcggggtgcagctgacccggaacggcacgatcatccccgccaacaacaccgtcagcctgggggccgtgggcacctccgccgtgagcctcgggctgaccgcgaactacgcccgcacgggcggccaggtcaccgccgggaacgtgcagtccatcatcggcgtgaccttcgtctaccagtgaggactagtccctgttcccagagcccacttttttttctttttttgaaataaaatagcctgtctttcagatctcaaaggctcttttcagagccaccaaaaaaaaaaaaaaaaaaaaaaaaaaaaaaaaaaaaaaaaaaaaaaaaaaaaaaaaaaaaaaaaaaaaaaaaaaaaaaaaaaaaaaaaaaaaaaaaaaaaa

SEQ ID NO: 674 - RNA, 1166 nt, synthetic construct
  misc_feature 1..1166: note = Artificial____HsIgE(1-18)_Ec(J96)-FimH(22-300) mRNA opt1
  source 1..1166: mol_type = other RNA
aggagagtcccgcagtcggcgtccagcggctctgcttgttcgtgtgtgtgtcgttgcaggccttattcaagcttaccatggactggacctggatcctgttcctcgtggccgccgcgacccgcgtccacagcttcgcctgcaagaccgccaacggcaccgcgatccccatcgggggcgggagcgccaacgtgtacgtcaacctggccccggtggtgaacgtcggccagaacctcgtggtggacctgtccacgcagatcttctgccacaacgactaccccgagaccatcaccgactacgtcaccctgcagcgcgggagcgcctacggcggcgtgctctccaacttcagcgggacggtgaagtactccggcagctcctaccccttccccaccaccagcgagaccccgcgggtcgtgtacaactcccgcacggacaagccctggcccgtggccctgtacctgacccccgtcagctccgccgggggcgtggcgatcaaggccgggagcctcatcgccgtgctgatcctgcggcagaccaacaactacaactccgacgacttccagttcgtctggaacatctacgcgaacaacgacgtggtggtcccgaccggcggctgcgacgtgagcgcccgcgacgtgacggtcaccctccccgactaccccgggtccgtgcccatcccgctgaccgtgtactgcgccaagagccagaacctgggctactacctctccgggaccacggccgacgccggcaacagcatcttcaccaacaccgcgtccttcagccccgcccagggcgtcggggtgcagctgacccggaacggcacgatcatccccgccaacaacaccgtcagcctgggggccgtgggcacctccgccgtgagcctcgggctgaccgcgaactacgcccgcacgggcggccaggtcaccgccgggaacgtgcagtccatcatcggcgtgaccttcgtctaccagtgaggactagtccctgttcccagagcccacttttttttctttttttgaaataaaatagcctgtctttcagatctcaaaggctcttttcagagccaccaaaaaaaaaaaaaaaaaaaaaaaaaaaaaaaaaaaaaaaaaaaaaaaaaaaaaaaaaaaaaaaaaaaaaaaaaaaaaaaaaaaaaaaaaaaaaaaaaaaaa

SEQ ID NO: 675 - RNA, 1172 nt, synthetic construct
  misc_feature 1..1172: note = Artificial____MmIgK(1-20)_Ec(J96)-FimH(22-300) mRNA opt1
  source 1..1172: mol_type = other RNA
aggagagtcccgcagtcggcgtccagcggctctgcttgttcgtgtgtgtgtcgttgcaggccttattcaagcttaccatggagaccgacaccctgctcctgtgggtgctgctcctgtgggtccccggcagcacggggttcgcctgcaagaccgccaacggcaccgcgatccccatcgggggcgggagcgccaacgtgtacgtcaacctggccccggtggtgaacgtcggccagaacctcgtggtggacctgtccacgcagatcttctgccacaacgactaccccgagaccatcaccgactacgtcaccctgcagcgcgggagcgcctacggcggcgtgctctccaacttcagcgggacggtgaagtactccggcagctcctaccccttccccaccaccagcgagaccccgcgggtcgtgtacaactcccgcacggacaagccctggcccgtggccctgtacctgacccccgtcagctccgccgggggcgtggcgatcaaggccgggagcctcatcgccgtgctgatcctgcggcagaccaacaactacaactccgacgacttccagttcgtctggaacatctacgcgaacaacgacgtggtggtcccgaccggcggctgcgacgtgagcgcccgcgacgtgacggtcaccctccccgactaccccgggtccgtgcccatcccgctgaccgtgtactgcgccaagagccagaacctgggctactacctctccgggaccacggccgacgccggcaacagcatcttcaccaacaccgcgtccttcagccccgcccagggcgtcggggtgcagctgacccggaacggcacgatcatccccgccaacaacaccgtcagcctgggggccgtgggcacctccgccgtgagcctcgggctgaccgcgaactacgcccgcacgggcggccaggtcaccgccgggaacgtgcagtccatcatcggcgtgaccttcgtctaccagtgaggactagtccctgttcccagagcccacttttttttctttttttgaaataaaatagcctgtctttcagatctcaaaggctcttttcagagccaccaaaaaaaaaaaaaaaaaaaaaaaaaaaaaaaaaaaaaaaaaaaaaaaaaaaaaaaaaaaaaaaaaaaaaaaaaaaaaaaaaaaaaaaaaaaaaaaaaaaaa

SEQ ID NO: 676 - RNA, 1232 nt, synthetic construct
  misc_feature 1..1232: note Artificial____Ec(J96)-FimH(1-21)_Ec(J96)-FimH(22-300)_Linke r-PGDGN_Ec(J96)-FimG(24-37) mRNA opt1
  source 1..1232: mol_type = other RNA
aggagagtcccgcagtcggcgtccagcggctctgcttgttcgtgtgtgtgtcgttgcaggccttattcaagcttaccatgaagcgcgtgatcaccctgttcgccgtcctcctgatgggctggagcgtgaacgcctggtccttcgcctgcaagaccgccaacggcaccgcgatccccatcgggggcgggagcgccaacgtgtacgtcaacctggccccggtggtgaacgtcggccagaacctcgtggtggacctgtccacgcagatcttctgccacaacgactaccccgagaccatcaccgactacgtcaccctgcagcgcgggagcgcctacggcggcgtgctctccaacttcagcgggacggtgaagtactccggcagctcctaccccttccccaccaccagcgagaccccgcgggtcgtgtacaactcccgcacggacaagccctggcccgtggccctgtacctgacccccgtcagctccgccgggggcgtggcgatcaaggccgggagcctcatcgccgtgctgatcctgcggcagaccaacaactacaactccgacgacttccagttcgtctggaacatctacgcgaacaacgacgtggtggtcccgaccggcggctgcgacgtgagcgcccgcgacgtgacggtcaccctccccgactaccccgggtccgtgcccatcccgctgaccgtgtactgcgccaagagccagaacctgggctactacctctccgggaccacggccgacgccggcaacagcatcttcaccaacaccgcgtccttcagccccgcccagggcgtcggggtgcagctgacccggaacggcacgatcatccccgccaacaacaccgtcagcctgggggccgtgggcacctccgccgtgagcctcgggctgaccgcgaactacgcccgcacgggcggccaggtcaccgccgggaacgtgcagtccatcatcggcgtgaccttcgtctaccagcccggcgacgggaacgccgacgtgaccatcaccgtcaacggcaaggtggtggccaagtgaggactagtccctgttcccagagcccacttttttttctttttttgaaataaaatagcctgtctttcagatctcaaaggctcttttcagagccaccaaaaaaaaaaaaaaaaaaaaaaaaaaaaaaaaaaaaaaaaaaaaaaaaaaaaaaaaaaaaaaaaaaaaaaaaaaaaaaaaaaaaaaaaaaaaaaaaaaaaa

SEQ ID NO: 677 - RNA, 1223 nt, synthetic construct
  misc_feature 1..1223: note Artificial____HsIgE(1-18)_Ec(J96)-FimH(22-300)_Linker-PGDGN _Ec(J96)-FimG(24-37) mRNA opt1
  source 1..1223: mol_type = other RNA
aggagagtcccgcagtcggcgtccagcggctctgcttgttcgtgtgtgtgtcgttgcaggccttattcaagcttaccatggactggacctggatcctgttcctcgtggccgccgcgacccgcgtccacagcttcgcctgcaagaccgccaacggcaccgcgatccccatcgggggcgggagcgccaacgtgtacgtcaacctggccccggtggtgaacgtcggccagaacctcgtggtggacctgtccacgcagatcttctgccacaacgactaccccgagaccatcaccgactacgtcaccctgcagcgcgggagcgcctacggcggcgtgctctccaacttcagcgggacggtgaagtactccggcagctcctaccccttccccaccaccagcgagaccccgcgggtcgtgtacaactcccgcacggacaagccctggcccgtggccctgtacctgacccccgtcagctccgccgggggcgtggcgatcaaggccgggagcctcatcgccgtgctgatcctgcggcagaccaacaactacaactccgacgacttccagttcgtctggaacatctacgcgaacaacgacgtggtggtcccgaccggcggctgcgacgtgagcgcccgcgacgtgacggtcaccctccccgactaccccgggtccgtgcccatcccgctgaccgtgtactgcgccaagagccagaacctgggctactacctctccgggaccacggccgacgccggcaacagcatcttcaccaacaccgcgtccttcagccccgcccagggcgtcggggtgcagctgacccggaacggcacgatcatccccgccaacaacaccgtcagcctgggggccgtgggcacctccgccgtgagcctcgggctgaccgcgaactacgcccgcacgggcggccaggtcaccgccgggaacgtgcagtccatcatcggcgtgaccttcgtctaccagcccggcgacgggaacgccgacgtgaccatcaccgtcaacggcaaggtggtggccaagtgaggactagtccctgttcccagagcccacttttttttctttttttgaaataaaatagcctgtctttcagatctcaaaggctcttttcagagccaccaaaaaaaaaaaaaaaaaaaaaaaaaaaaaaaaaaaaaaaaaaaaaaaaaaaaaaaaaaaaaaaaaaaaaaaaaaaaaaaaaaaaaaaaaaaaaaaaaaaaa

SEQ ID NO: 678 - RNA, 1229 nt, synthetic construct
  misc_feature 1..1229: note Artificial____HsIgE(1-18)_Ec(J96)-FimH(22-300)_Linker-G4SGG _Ec(J96)-FimG(24-37) mRNA opt1
  source 1..1229: mol_type = other RNA
aggagagtcccgcagtcggcgtccagcggctctgcttgttcgtgtgtgtgtcgttgcaggccttattcaagcttaccatggactggacctggatcctgttcctcgtggccgccgcgacccgcgtccacagcttcgcctgcaagaccgccaacggcaccgcgatccccatcgggggcgggagcgccaacgtgtacgtcaacctggccccggtggtgaacgtcggccagaacctcgtggtggacctgtccacgcagatcttctgccacaacgactaccccgagaccatcaccgactacgtcaccctgcagcgcgggagcgcctacggcggcgtgctctccaacttcagcgggacggtgaagtactccggcagctcctaccccttccccaccaccagcgagaccccgcgggtcgtgtacaactcccgcacggacaagccctggcccgtggccctgtacctgacccccgtcagctccgccgggggcgtggcgatcaaggccgggagcctcatcgccgtgctgatcctgcggcagaccaacaactacaactccgacgacttccagttcgtctggaacatctacgcgaacaacgacgtggtggtcccgaccggcggctgcgacgtgagcgcccgcgacgtgacggtcaccctccccgactaccccgggtccgtgcccatcccgctgaccgtgtactgcgccaagagccagaacctgggctactacctctccgggaccacggccgacgccggcaacagcatcttcaccaacaccgcgtccttcagccccgcccagggcgtcggggtgcagctgacccggaacggcacgatcatccccgccaacaacaccgtcagcctgggggccgtgggcacctccgccgtgagcctcgggctgaccgcgaactacgcccgcacgggcggccaggtcaccgccgggaacgtgcagtccatcatcggcgtgaccttcgtctaccagggcggcggcggctccggaggcgccgacgtgaccatcaccgtcaacggcaaggtggtggccaagtgaggactagtccctgttcccagagcccacttttttttctttttttgaaataaaatagcctgtctttcagatctcaaaggctcttttcagagccaccaaaaaaaaaaaaaaaaaaaaaaaaaaaaaaaaaaaaaaaaaaaaaaaaaaaaaaaaaaaaaaaaaaaaaaaaaaaaaaaaaaaaaaaaaaaaaaaaaaaaa

SEQ ID NO: 679 - RNA, 1229 nt, synthetic construct
  misc_feature 1..1229: note Artificial____MmIgK(1-20)_Ec(J96)-FimH(22-300)_Linker-PGDGN _Ec(J96)-FimG(24-37) mRNA opt1
  source 1..1229: mol_type = other RNA
aggagagtcccgcagtcggcgtccagcggctctgcttgttcgtgtgtgtgtcgttgcaggccttattcaagcttaccatggagaccgacaccctgctcctgtgggtgctgctcctgtgggtccccggcagcacggggttcgcctgcaagaccgccaacggcaccgcgatccccatcgggggcgggagcgccaacgtgtacgtcaacctggccccggtggtgaacgtcggccagaacctcgtggtggacctgtccacgcagatcttctgccacaacgactaccccgagaccatcaccgactacgtcaccctgcagcgcgggagcgcctacggcggcgtgctctccaacttcagcgggacggtgaagtactccggcagctcctaccccttccccaccaccagcgagaccccgcgggtcgtgtacaactcccgcacggacaagccctggcccgtggccctgtacctgacccccgtcagctccgccgggggcgtggcgatcaaggccgggagcctcatcgccgtgctgatcctgcggcagaccaacaactacaactccgacgacttccagttcgtctggaacatctacgcgaacaacgacgtggtggtcccgaccggcggctgcgacgtgagcgcccgcgacgtgacggtcaccctccccgactaccccgggtccgtgcccatcccgctgaccgtgtactgcgccaagagccagaacctgggctactacctctccgggaccacggccgacgccggcaacagcatcttcaccaacaccgcgtccttcagccccgcccagggcgtcggggtgcagctgacccggaacggcacgatcatccccgccaacaacaccgtcagcctgggggccgtgggcacctccgccgtgagcctcgggctgaccgcgaactacgcccgcacgggcggccaggtcaccgccgggaacgtgcagtccatcatcggcgtgaccttcgtctaccagcccggcgacgggaacgccgacgtgaccatcaccgtcaacggcaaggtggtggccaagtgaggactagtccctgttcccagagcccacttttttttctttttttgaaataaaatagcctgtctttcagatctcaaaggctcttttcagagccaccaaaaaaaaaaaaaaaaaaaaaaaaaaaaaaaaaaaaaaaaaaaaaaaaaaaaaaaaaaaaaaaaaaaaaaaaaaaaaaaaaaaaaaaaaaaaaaaaaaaaa

SEQ ID NO: 680 - RNA, 1229 nt, synthetic construct
  misc_feature 1..1229: note Artificial____MmIgK(1-20)_Ec(536)-FimH(22-300)_Linker-PGDGN _Ec(J96)-FimG(24-37) mRNA opt1
  source 1..1229: mol_type = other RNA
aggagagtcccgcagtcggcgtccagcggctctgcttgttcgtgtgtgtgtcgttgcaggccttattcaagcttaccatggagaccgacaccctgctcctgtgggtgctgctcctgtgggtccccggcagcacggggttcgcctgcaagaccgccaacggcaccgcgatccccatcgggggcgggagcgccaacgtgtacgtcaacctggccccggccgtgaacgtcggccagaacctcgtggtggacctgtccacgcagatcttctgccacaacgactaccccgagaccatcaccgactacgtcaccctgcagcgcgggagcgcctacggcggcgtgctctccagcttcagcgggacggtgaagtacaacggcagctcctaccccttccccaccaccagcgagaccccgcgggtcgtgtacaactcccgcacggacaagccctggcccgtggccctgtacctgacccccgtcagctccgccgggggcgtggcgatcaaggccgggagcctcatcgccgtgctgatcctgcggcagaccaacaactacaactccgacgacttccagttcgtctggaacatctacgcgaacaacgacgtggtggtcccgaccggcggctgcgacgtgagcgcccgcgacgtgacggtcaccctccccgactaccccgggtccgtgcccatcccgctgaccgtgtactgcgccaagagccagaacctgggctactacctctccgggaccacggccgacgccggcaacagcatcttcaccaacaccgcgtccttcagccccgcccagggcgtcggggtgcagctgacccggaacggcacgatcatccccgccaacaacaccgtcagcctgggggccgtgggcacctccgccgtgagcctcgggctgaccgcgaactacgcccgcacgggcggccaggtcaccgccgggaacgtgcagtccatcatcggcgtgaccttcgtctaccagcccggcgacgggaacgccgacgtgaccatcaccgtcaacggcaaggtggtggccaagtgaggactagtccctgttcccagagcccacttttttttctttttttgaaataaaatagcctgtctttcagatctcaaaggctcttttcagagccaccaaaaaaaaaaaaaaaaaaaaaaaaaaaaaaaaaaaaaaaaaaaaaaaaaaaaaaaaaaaaaaaaaaaaaaaaaaaaaaaaaaaaaaaaaaaaaaaaaaaaa

SEQ ID NO: 681 - RNA, 1253 nt, synthetic construct
  misc_feature 1..1253: note Artificial____HsIgE(1-18)_Ec(J96)-FimH(22-300)_Linker-(G4S) 3_Ec(J96)-FimC(135-148) mRNA opt1
  source 1..1253: mol_type = other RNA
aggagagtcccgcagtcggcgtccagcggctctgcttgttcgtgtgtgtgtcgttgcaggccttattcaagcttaccatggactggacctggatcctgttcctcgtggccgccgcgacccgcgtccacagcttcgcctgcaagaccgccaacggcaccgcgatccccatcgggggcgggagcgccaacgtgtacgtcaacctggccccggtggtgaacgtcggccagaacctcgtggtggacctgtccacgcagatcttctgccacaacgactaccccgagaccatcaccgactacgtcaccctgcagcgcgggagcgcctacggcggcgtgctctccaacttcagcgggacggtgaagtactccggcagctcctaccccttccccaccaccagcgagaccccgcgggtcgtgtacaactcccgcacggacaagccctggcccgtggccctgtacctgacccccgtcagctccgccgggggcgtggcgatcaaggccgggagcctcatcgccgtgctgatcctgcggcagaccaacaactacaactccgacgacttccagttcgtctggaacatctacgcgaacaacgacgtggtggtcccgaccggcggctgcgacgtgagcgcccgcgacgtgacggtcaccctccccgactaccccgggtccgtgcccatcccgctgaccgtgtactgcgccaagagccagaacctgggctactacctctccgggaccacggccgacgccggcaacagcatcttcaccaacaccgcgtccttcagccccgcccagggcgtcggggtgcagctgacccggaacggcacgatcatccccgccaacaacaccgtcagcctgggggccgtgggcacctccgccgtgagcctcgggctgaccgcgaactacgcccgcacgggcggccaggtcaccgccgggaacgtgcagtccatcatcggcgtgaccttcgtctaccagggcgggggcgggagcggcgggggcggctccgggggcgggggcagcacggagaacaccctgcagctcgccatcatctcccgcatcaagtgaggactagtccctgttcccagagcccacttttttttctttttttgaaataaaatagcctgtctttcagatctcaaaggctcttttcagagccaccaaaaaaaaaaaaaaaaaaaaaaaaaaaaaaaaaaaaaaaaaaaaaaaaaaaaaaaaaaaaaaaaaaaaaaaaaaaaaaaaaaaaaaaaaaaaaaaaaaaaa

SEQ ID NO: 682 - RNA, 1676 nt, synthetic construct
  misc_feature 1..1676: note Artificial____LumSynth(1-154_C37A_N102D)_Linker(GGS)4-GGG_E c(J96)-FimH(22-300)_Linker-PGDGN_Ec(J96)-FimG(24-37) mRNA opt1
  source 1..1676: mol_type = other RNA
aggagagtcccgcagtcggcgtccagcggctctgcttgttcgtgtgtgtgtcgttgcaggccttattcaagcttaccatgcagatctacgagggcaagctgaccgccgaggggctccgcttcggcatcgtggccagccggttcaaccacgcgctggtcgaccgcctggtggagggggccatcgacgccatcgtgcggcacggcgggcgcgaggaggacatcaccctcgtccgggtgcccggctcctgggagatcccggtggccgccggcgagctggcccgcaaggaggacatcgacgcggtcatcgccatcggggtgctgatccggggcgccacgccccacttcgactacatcgccagcgaggtgtccaaggggctcgcggacctgagcctggagctccgcaagcccatcaccttcggcgtcatcaccgccgacaccctggagcaggccatcgagcgggccgggacgaagcacggcaacaagggctgggaggccgcgctgtccgccatcgagatggccaacctcttcaagagcctgcgcggcgggagcggcgggtccggcgggagcggcggctccgggggcgggttcgcctgcaagaccgccaacggcaccgcgatccccatcgggggcgggagcgccaacgtgtacgtcaacctggccccggtggtgaacgtcggccagaacctcgtggtggacctgtccacgcagatcttctgccacaacgactaccccgagaccatcaccgactacgtcaccctgcagcgcgggagcgcctacggcggcgtgctctccaacttcagcgggacggtgaagtactccggcagctcctaccccttccccaccaccagcgagaccccgcgggtcgtgtacaactcccgcacggacaagccctggcccgtggccctgtacctgacccccgtcagctccgccgggggcgtggcgatcaaggccgggagcctcatcgccgtgctgatcctgcggcagaccaacaactacaactccgacgacttccagttcgtctggaacatctacgcgaacaacgacgtggtggtcccgaccggcggctgcgacgtgagcgcccgcgacgtgacggtcaccctccccgactaccccgggtccgtgcccatcccgctgaccgtgtactgcgccaagagccagaacctgggctactacctctccgggaccacggccgacgccggcaacagcatcttcaccaacaccgcgtccttcagccccgcccagggcgtcggggtgcagctgacccggaacggcacgatcatccccgccaacaacaccgtcagcctgggggccgtgggcacctccgccgtgagcctcgggctgaccgcgaactacgcccgcacgggcggccaggtcaccgccgggaacgtgcagtccatcatcggcgtgaccttcgtctaccagcccggcgacgggaacgccgacgtgaccatcaccgtcaacggcaaggtggtggccaagtgaggactagtccctgttcccagagcccacttttttttctttttttgaaataaaatagcctgtctttcagatctcaaaggctcttttcagagccaccaaaaaaaaaaaaaaaaaaaaaaaaaaaaaaaaaaaaaaaaaaaaaaaaaaaaaaaaaaaaaaaaaaaaaaaaaaaaaaaaaaaaaaaaaaaaaaaaaaaaa

SEQ ID NO: 683 - RNA, 1694 nt, synthetic construct
  misc_feature 1..1694: note Artificial____HsIgE(1-18)_Ec(J96)-FimH(22-300)_Linker-PGDGN _Ec(J96)-FimG(24-37)_Linker-SGG_LumSynth(1-154_C37A_N102D) mRNA opt1
  source 1..1694: mol_type = other RNA
aggagagtcccgcagtcggcgtccagcggctctgcttgttcgtgtgtgtgtcgttgcaggccttattcaagcttaccatggactggacctggatcctgttcctcgtggccgccgcgacccgcgtccacagcttcgcctgcaagaccgccaacggcaccgcgatccccatcgggggcgggagcgccaacgtgtacgtcaacctggccccggtggtgaacgtcggccagaacctcgtggtggacctgtccacgcagatcttctgccacaacgactaccccgagaccatcaccgactacgtcaccctgcagcgcgggagcgcctacggcggcgtgctctccaacttcagcgggacggtgaagtactccggcagctcctaccccttccccaccaccagcgagaccccgcgggtcgtgtacaactcccgcacggacaagccctggcccgtggccctgtacctgacccccgtcagctccgccgggggcgtggcgatcaaggccgggagcctcatcgccgtgctgatcctgcggcagaccaacaactacaactccgacgacttccagttcgtctggaacatctacgcgaacaacgacgtggtggtcccgaccggcggctgcgacgtgagcgcccgcgacgtgacggtcaccctccccgactaccccgggtccgtgcccatcccgctgaccgtgtactgcgccaagagccagaacctgggctactacctctccgggaccacggccgacgccggcaacagcatcttcaccaacaccgcgtccttcagccccgcccagggcgtcggggtgcagctgacccggaacggcacgatcatccccgccaacaacaccgtcagcctgggggccgtgggcacctccgccgtgagcctcgggctgaccgcgaactacgcccgcacgggcggccaggtcaccgccgggaacgtgcagtccatcatcggcgtgaccttcgtctaccagcccggcgacgggaacgccgacgtgaccatcaccgtcaacggcaaggtggtggccaagagcggcgggatgcagatctacgagggcaagctgaccgccgaggggctccgcttcggcatcgtggccagccggttcaaccacgcgctggtcgaccgcctggtggagggggccatcgacgccatcgtgcggcacggcgggcgcgaggaggacatcaccctcgtccgggtgcccggctcctgggagatcccggtggccgccggcgagctggcccgcaaggaggacatcgacgcggtcatcgccatcggggtgctgatccggggcgccacgccccacttcgactacatcgccagcgaggtgtccaaggggctcgcggacctgagcctggagctccgcaagcccatcaccttcggcgtcatcaccgccgacaccctggagcaggccatcgagcgggccgggacgaagcacggcaacaagggctgggaggccgcgctgtccgccatcgagatggccaacctcttcaagagcctgcgctgaggactagtccctgttcccagagcccacttttttttctttttttgaaataaaatagcctgtctttcagatctcaaaggctcttttcagagccaccaaaaaaaaaaaaaaaaaaaaaaaaaaaaaaaaaaaaaaaaaaaaaaaaaaaaaaaaaaaaaaaaaaaaaaaaaaaaaaaaaaaaaaaaaaaaaaaaaaaaa

SEQ ID NO: 684 - RNA, 1721 nt, synthetic construct
  misc_feature 1..1721: note Artificial____HsIgE(1-18)_Ec(J96)-FimH(22-300)_Linker-PGDGN _Ec(J96)-FimG(24-37)_Linker-SGG_Ferritin(5-167_N19Q) mRNA opt1
  source 1..1721: mol_type = other RNA
aggagagtcccgcagtcggcgtccagcggctctgcttgttcgtgtgtgtgtcgttgcaggccttattcaagcttaccatggactggacctggatcctgttcctcgtggccgccgcgacccgcgtccacagcttcgcctgcaagaccgccaacggcaccgcgatccccatcgggggcgggagcgccaacgtgtacgtcaacctggccccggtggtgaacgtcggccagaacctcgtggtggacctgtccacgcagatcttctgccacaacgactaccccgagaccatcaccgactacgtcaccctgcagcgcgggagcgcctacggcggcgtgctctccaacttcagcgggacggtgaagtactccggcagctcctaccccttccccaccaccagcgagaccccgcgggtcgtgtacaactcccgcacggacaagccctggcccgtggccctgtacctgacccccgtcagctccgccgggggcgtggcgatcaaggccgggagcctcatcgccgtgctgatcctgcggcagaccaacaactacaactccgacgacttccagttcgtctggaacatctacgcgaacaacgacgtggtggtcccgaccggcggctgcgacgtgagcgcccgcgacgtgacggtcaccctccccgactaccccgggtccgtgcccatcccgctgaccgtgtactgcgccaagagccagaacctgggctactacctctccgggaccacggccgacgccggcaacagcatcttcaccaacaccgcgtccttcagccccgcccagggcgtcggggtgcagctgacccggaacggcacgatcatccccgccaacaacaccgtcagcctgggggccgtgggcacctccgccgtgagcctcgggctgaccgcgaactacgcccgcacgggcggccaggtcaccgccgggaacgtgcagtccatcatcggcgtgaccttcgtctaccagcccggcgacgggaacgccgacgtgaccatcaccgtcaacggcaaggtggtggccaagagcggcggggacatcatcaagctcctgaacgagcaggtcaacaaggagatgcagtccagcaacctgtacatgtccatgagctcctggtgctacacccacagcctcgacggcgccgggctgttcctgttcgaccacgccgcggaggagtacgagcacgccaagaagctcatcatcttcctgaacgagaacaacgtgcccgtgcagctgacctccatcagcgccccggagcacaagttcgagggcctcacgcagatcttccagaaggcctacgagcacgagcagcacatctccgagagcatcaacaacatcgtggaccacgccatcaagtccaaggaccacgcgaccttcaacttcctgcagtggtacgtcgccgagcagcacgaggaggaggtgctgttcaaggacatcctcgacaagatcgagctgatcgggaacgagaaccacggcctgtacctcgccgaccagtacgtgaaggggatcgccaagagccgcaagtcctgaggactagtccctgttcccagagcccacttttttttctttttttgaaataaaatagcctgtctttcagatctcaaaggctcttttcagagccaccaaaaaaaaaaaaaaaaaaaaaaaaaaaaaaaaaaaaaaaaaaaaaaaaaaaaaaaaaaaaaaaaaaaaaaaaaaaaaaaaaaaaaaaaaaaaaaaaaaaaa

SEQ ID NO: 685 - RNA, 1751 nt, synthetic construct
  misc_feature 1..1751: note Artificial____MmIgK(1-20)_Ec(J96)-FimH(22-300)_Linker-PGDGN _Ec(J96)-FimG(24-37)_Linker-(GGS)4_Ferritin(5-166) mRNA opt1
  source 1..1751: mol_type = other RNA
aggagagtcccgcagtcggcgtccagcggctctgcttgttcgtgtgtgtgtcgttgcaggccttattcaagcttaccatggagaccgacaccctgctcctgtgggtgctgctcctgtgggtccccggcagcacggggttcgcctgcaagaccgccaacggcaccgcgatccccatcgggggcgggagcgccaacgtgtacgtcaacctggccccggtggtgaacgtcggccagaacctcgtggtggacctgtccacgcagatcttctgccacaacgactaccccgagaccatcaccgactacgtcaccctgcagcgcgggagcgcctacggcggcgtgctctccaacttcagcgggacggtgaagtactccggcagctcctaccccttccccaccaccagcgagaccccgcgggtcgtgtacaactcccgcacggacaagccctggcccgtggccctgtacctgacccccgtcagctccgccgggggcgtggcgatcaaggccgggagcctcatcgccgtgctgatcctgcggcagaccaacaactacaactccgacgacttccagttcgtctggaacatctacgcgaacaacgacgtggtggtcccgaccggcggctgcgacgtgagcgcccgcgacgtgacggtcaccctccccgactaccccgggtccgtgcccatcccgctgaccgtgtactgcgccaagagccagaacctgggctactacctctccgggaccacggccgacgccggcaacagcatcttcaccaacaccgcgtccttcagccccgcccagggcgtcggggtgcagctgacccggaacggcacgatcatccccgccaacaacaccgtcagcctgggggccgtgggcacctccgccgtgagcctcgggctgaccgcgaactacgcccgcacgggcggccaggtcaccgccgggaacgtgcagtccatcatcggcgtgaccttcgtctaccagcccggcgacgggaacgccgacgtgaccatcaccgtcaacggcaaggtggtggccaagggcgggagcggcgggtccggcgggagcggcggctccgacatcatcaagctcctgaacgagcaggtcaacaaggagatgaactccagcaacctgtacatgtccatgagctcctggtgctacacccacagcctcgacggcgccgggctgttcctgttcgaccacgccgcggaggagtacgagcacgccaagaagctcatcatcttcctgaacgagaacaacgtgcccgtgcagctgacctccatcagcgccccggagcacaagttcgagggcctcacgcagatcttccagaaggcctacgagcacgagcagcacatctccgagagcatcaacaacatcgtggaccacgccatcaagtccaaggaccacgcgaccttcaacttcctgcagtggtacgtcgccgagcagcacgaggaggaggtgctgttcaaggacatcctcgacaagatcgagctgatcgggaacgagaaccacggcctgtacctcgccgaccagtacgtgaaggggatcgccaagagccgcaagtgaggactagtccctgttcccagagcccacttttttttctttttttgaaataaaatagcctgtctttcagatctcaaaggctcttttcagagccaccaaaaaaaaaaaaaaaaaaaaaaaaaaaaaaaaaaaaaaaaaaaaaaaaaaaaaaaaaaaaaaaaaaaaaaaaaaaaaaaaaaaaaaaaaaaaaaaaaaaaa

SEQ ID NO: 686 - RNA, 1394 nt, synthetic construct
  misc_feature 1..1394: note Artificial____HsIgE(1-18)_Ec(J96)-FimH(22-300)_Linker-PGDGN _Ec(J96)-FimG(24-37)_TMdomain-HA(510-566) mRNA opt1
  source 1..1394: mol_type = other RNA
aggagagtcccgcagtcggcgtccagcggctctgcttgttcgtgtgtgtgtcgttgcaggccttattcaagcttaccatggactggacctggatcctgttcctcgtggccgccgcgacccgcgtccacagcttcgcctgcaagaccgccaacggcaccgcgatccccatcgggggcgggagcgccaacgtgtacgtcaacctggccccggtggtgaacgtcggccagaacctcgtggtggacctgtccacgcagatcttctgccacaacgactaccccgagaccatcaccgactacgtcaccctgcagcgcgggagcgcctacggcggcgtgctctccaacttcagcgggacggtgaagtactccggcagctcctaccccttccccaccaccagcgagaccccgcgggtcgtgtacaactcccgcacggacaagccctggcccgtggccctgtacctgacccccgtcagctccgccgggggcgtggcgatcaaggccgggagcctcatcgccgtgctgatcctgcggcagaccaacaactacaactccgacgacttccagttcgtctggaacatctacgcgaacaacgacgtggtggtcccgaccggcggctgcgacgtgagcgcccgcgacgtgacggtcaccctccccgactaccccgggtccgtgcccatcccgctgaccgtgtactgcgccaagagccagaacctgggctactacctctccgggaccacggccgacgccggcaacagcatcttcaccaacaccgcgtccttcagccccgcccagggcgtcggggtgcagctgacccggaacggcacgatcatccccgccaacaacaccgtcagcctgggggccgtgggcacctccgccgtgagcctcgggctgaccgcgaactacgcccgcacgggcggccaggtcaccgccgggaacgtgcagtccatcatcggcgtgaccttcgtctaccagcccggcgacgggaacgccgacgtgaccatcaccgtcaacggcaaggtggtggccaaggccaagctgaaccgcgaggagatcgacggcgtgaagctcgagtccacgcggatctaccagatcctggcgatctacagcaccgtcgccagctccctggtgctcgtggtcagcctgggggccatctccttctggatgtgcagcaacggctccctgcagtgccgcatctgcatctgaggactagtccctgttcccagagcccacttttttttctttttttgaaataaaatagcctgtctttcagatctcaaaggctcttttcagagccaccaaaaaaaaaaaaaaaaaaaaaaaaaaaaaaaaaaaaaaaaaaaaaaaaaaaaaaaaaaaaaaaaaaaaaaaaaaaaaaaaaaaaaaaaaaaaaaaaaaaaa

SEQ ID NO: 687 - RNA, 1727 nt, synthetic construct
  misc_feature 1..1727: note Artificial____HsIgE(1-18)_LumSynth(1-154_C37A_N102D)_Linker (GGS)4-GGG_Ec(J96)-FimH(22-300)_Linker-PGDGN_Ec(J96)-FimG(2 4-37) mRNA opt1
  source 1..1727: mol_type = other RNA
aggagagtcccgcagtcggcgtccagcggctctgcttgttcgtgtgtgtgtcgttgcaggccttattcaagcttaccatggactggacctggatcctgttcctcgtggccgccgcgacccgcgtccacagccagatctacgagggcaagctgaccgccgaggggctccgcttcggcatcgtggccagccggttcaaccacgcgctggtcgaccgcctggtggagggggccatcgacgccatcgtgcggcacggcgggcgcgaggaggacatcaccctcgtccgggtgcccggctcctgggagatcccggtggccgccggcgagctggcccgcaaggaggacatcgacgcggtcatcgccatcggggtgctgatccggggcgccacgccccacttcgactacatcgccagcgaggtgtccaaggggctcgcggacctgagcctggagctccgcaagcccatcaccttcggcgtcatcaccgccgacaccctggagcaggccatcgagcgggccgggacgaagcacggcaacaagggctgggaggccgcgctgtccgccatcgagatggccaacctcttcaagagcctgcgcggcgggagcggcgggtccggcgggagcggcggctccgggggcgggttcgcctgcaagaccgccaacggcaccgcgatccccatcgggggcgggagcgccaacgtgtacgtcaacctggccccggtggtgaacgtcggccagaacctcgtggtggacctgtccacgcagatcttctgccacaacgactaccccgagaccatcaccgactacgtcaccctgcagcgcgggagcgcctacggcggcgtgctctccaacttcagcgggacggtgaagtactccggcagctcctaccccttccccaccaccagcgagaccccgcgggtcgtgtacaactcccgcacggacaagccctggcccgtggccctgtacctgacccccgtcagctccgccgggggcgtggcgatcaaggccgggagcctcatcgccgtgctgatcctgcggcagaccaacaactacaactccgacgacttccagttcgtctggaacatctacgcgaacaacgacgtggtggtcccgaccggcggctgcgacgtgagcgcccgcgacgtgacggtcaccctccccgactaccccgggtccgtgcccatcccgctgaccgtgtactgcgccaagagccagaacctgggctactacctctccgggaccacggccgacgccggcaacagcatcttcaccaacaccgcgtccttcagccccgcccagggcgtcggggtgcagctgacccggaacggcacgatcatccccgccaacaacaccgtcagcctgggggccgtgggcacctccgccgtgagcctcgggctgaccgcgaactacgcccgcacgggcggccaggtcaccgccgggaacgtgcagtccatcatcggcgtgaccttcgtctaccagcccggcgacgggaacgccgacgtgaccatcaccgtcaacggcaaggtggtggccaagtgaggactagtccctgttcccagagcccacttttttttctttttttgaaataaaatagcctgtctttcagatctcaaaggctcttttcagagccaccaaaaaaaaaaaaaaaaaaaaaaaaaaaaaaaaaaaaaaaaaaaaaaaaaaaaaaaaaaaaaaaaaaaaaaaaaaaaaaaaaaaaaaaaaaaaaaaaaaaaa

SEQ ID NO: 688 - RNA, 1694 nt, synthetic construct
  misc_feature 1..1694: note Artificial____HsIgE(1-18)_Ec(J96)-FimH(22-300_N28S_N91S_N24 9Q)_Linker-PGDGN_Ec(J96)-FimG(24-37)_Linker-SGG_LumSynth(1- 154_C37A_N102D) mRNA opt1
  source 1..1694: mol_type = other RNA
aggagagtcccgcagtcggcgtccagcggctctgcttgttcgtgtgtgtgtcgttgcaggccttattcaagcttaccatggactggacctggatcctgttcctcgtggccgccgcgacccgcgtccacagcttcgcctgcaagaccgccagcggcaccgcgatccccatcgggggcgggagcgccaacgtgtacgtcaacctggccccggtggtgaacgtcggccagaacctcgtggtggacctgtccacgcagatcttctgccacaacgactaccccgagaccatcaccgactacgtcaccctgcagcgcgggagcgcctacggcggcgtgctctccagcttcagcgggacggtgaagtactccggcagctcctaccccttccccaccaccagcgagaccccgcgggtcgtgtacaactcccgcacggacaagccctggcccgtggccctgtacctgacccccgtcagctccgccgggggcgtggcgatcaaggccgggagcctcatcgccgtgctgatcctgcggcagaccaacaactacaactccgacgacttccagttcgtctggaacatctacgcgaacaacgacgtggtggtcccgaccggcggctgcgacgtgagcgcccgcgacgtgacggtcaccctccccgactaccccgggtccgtgcccatcccgctgaccgtgtactgcgccaagagccagaacctgggctactacctctccgggaccacggccgacgccggcaacagcatcttcaccaacaccgcgtccttcagccccgcccagggcgtcggggtgcagctgacccggcagggcacgatcatccccgccaacaacaccgtcagcctgggggccgtgggcacctccgccgtgagcctcgggctgaccgcgaactacgcccgcacgggcggccaggtcaccgccgggaacgtgcagtccatcatcggcgtgaccttcgtctaccagcccggcgacgggaacgccgacgtgaccatcaccgtcaacggcaaggtggtggccaagagcggcgggatgcagatctacgagggcaagctgaccgccgaggggctccgcttcggcatcgtggccagccggttcaaccacgcgctggtcgaccgcctggtggagggggccatcgacgccatcgtgcggcacggcgggcgcgaggaggacatcaccctcgtccgggtgcccggctcctgggagatcccggtggccgccggcgagctggcccgcaaggaggacatcgacgcggtcatcgccatcggggtgctgatccggggcgccacgccccacttcgactacatcgccagcgaggtgtccaaggggctcgcggacctgagcctggagctccgcaagcccatcaccttcggcgtcatcaccgccgacaccctggagcaggccatcgagcgggccgggacgaagcacggcaacaagggctgggaggccgcgctgtccgccatcgagatggccaacctcttcaagagcctgcgctgaggactagtccctgttcccagagcccacttttttttctttttttgaaataaaatagcctgtctttcagatctcaaaggctcttttcagagccaccaaaaaaaaaaaaaaaaaaaaaaaaaaaaaaaaaaaaaaaaaaaaaaaaaaaaaaaaaaaaaaaaaaaaaaaaaaaaaaaaaaaaaaaaaaaaaaaaaaaaa

SEQ ID NO: 689 - RNA, 1694 nt, synthetic construct
  misc_feature 1..1694: note Artificial____HsIgE(1-18)_Ec(J96)-FimH(22-300_N28S_N91S_N24 9Q_N256D)_Linker-PGDGN_Ec(J96)-FimG(24-37)_Linker-SGG_LumSy nth(1-154_C37A_N102D) mRNA opt1
  source 1..1694: mol_type = other RNA
aggagagtcccgcagtcggcgtccagcggctctgcttgttcgtgtgtgtgtcgttgcaggccttattcaagcttaccatggactggacctggatcctgttcctcgtggccgccgcgacccgcgtccacagcttcgcctgcaagaccgccagcggcaccgcgatccccatcgggggcgggagcgccaacgtgtacgtcaacctggccccggtggtgaacgtcggccagaacctcgtggtggacctgtccacgcagatcttctgccacaacgactaccccgagaccatcaccgactacgtcaccctgcagcgcgggagcgcctacggcggcgtgctctccagcttcagcgggacggtgaagtactccggcagctcctaccccttccccaccaccagcgagaccccgcgggtcgtgtacaactcccgcacggacaagccctggcccgtggccctgtacctgacccccgtcagctccgccgggggcgtggcgatcaaggccgggagcctcatcgccgtgctgatcctgcggcagaccaacaactacaactccgacgacttccagttcgtctggaacatctacgcgaacaacgacgtggtggtcccgaccggcggctgcgacgtgagcgcccgcgacgtgacggtcaccctccccgactaccccgggtccgtgcccatcccgctgaccgtgtactgcgccaagagccagaacctgggctactacctctccgggaccacggccgacgccggcaacagcatcttcaccaacaccgcgtccttcagccccgcccagggcgtcggggtgcagctgacccggcagggcacgatcatccccgccgacaacaccgtcagcctgggggccgtgggcacctccgccgtgagcctcgggctgaccgcgaactacgcccgcacgggcggccaggtcaccgccgggaacgtgcagtccatcatcggcgtgaccttcgtctaccagcccggcgacgggaacgccgacgtgaccatcaccgtcaacggcaaggtggtggccaagagcggcgggatgcagatctacgagggcaagctgaccgccgaggggctccgcttcggcatcgtggccagccggttcaaccacgcgctggtcgaccgcctggtggagggggccatcgacgccatcgtgcggcacggcgggcgcgaggaggacatcaccctcgtccgggtgcccggctcctgggagatcccggtggccgccggcgagctggcccgcaaggaggacatcgacgcggtcatcgccatcggggtgctgatccggggcgccacgccccacttcgactacatcgccagcgaggtgtccaaggggctcgcggacctgagcctggagctccgcaagcccatcaccttcggcgtcatcaccgccgacaccctggagcaggccatcgagcgggccgggacgaagcacggcaacaagggctgggaggccgcgctgtccgccatcgagatggccaacctcttcaagagcctgcgctgaggactagtccctgttcccagagcccacttttttttctttttttgaaataaaatagcctgtctttcagatctcaaaggctcttttcagagccaccaaaaaaaaaaaaaaaaaaaaaaaaaaaaaaaaaaaaaaaaaaaaaaaaaaaaaaaaaaaaaaaaaaaaaaaaaaaaaaaaaaaaaaaaaaaaaaaaaaaaa

SEQ ID NO: 690 - RNA, 1694 nt, synthetic construct
  misc_feature 1..1694: note Artificial____HsIgE(1-18)_Ec(J96)-FimH(22-300_N28S_V48C_L55 C_N91S_N249Q)_Linker-PGDGN_Ec(J96)-FimG(24-37)_Linker-SGG_L umSynth(1-154_C37A_N102D) mRNA opt1
  source 1..1694: mol_type = other RNA
aggagagtcccgcagtcggcgtccagcggctctgcttgttcgtgtgtgtgtcgttgcaggccttattcaagcttaccatggactggacctggatcctgttcctcgtggccgccgcgacccgcgtccacagcttcgcctgcaagaccgccagcggcaccgcgatccccatcgggggcgggagcgccaacgtgtacgtcaacctggccccgtgcgtgaacgtcggccagaactgcgtggtggacctgtccacgcagatcttctgccacaacgactaccccgagaccatcaccgactacgtcaccctgcagcgcgggagcgcctacggcggcgtgctctccagcttcagcgggacggtgaagtactccggcagctcctaccccttccccaccaccagcgagaccccgcgggtcgtgtacaactcccgcacggacaagccctggcccgtggccctgtacctgacccccgtcagctccgccgggggcgtggcgatcaaggccgggagcctcatcgccgtgctgatcctgcggcagaccaacaactacaactccgacgacttccagttcgtctggaacatctacgcgaacaacgacgtggtggtcccgaccggcggctgcgacgtgagcgcccgcgacgtgacggtcaccctccccgactaccccgggtccgtgcccatcccgctgaccgtgtactgcgccaagagccagaacctgggctactacctctccgggaccacggccgacgccggcaacagcatcttcaccaacaccgcgtccttcagccccgcccagggcgtcggggtgcagctgacccggcagggcacgatcatccccgccaacaacaccgtcagcctgggggccgtgggcacctccgccgtgagcctcgggctgaccgcgaactacgcccgcacgggcggccaggtcaccgccgggaacgtgcagtccatcatcggcgtgaccttcgtctaccagcccggcgacgggaacgccgacgtgaccatcaccgtcaacggcaaggtggtggccaagagcggcgggatgcagatctacgagggcaagctgaccgccgaggggctccgcttcggcatcgtggccagccggttcaaccacgcgctggtcgaccgcctggtggagggggccatcgacgccatcgtgcggcacggcgggcgcgaggaggacatcaccctcgtccgggtgcccggctcctgggagatcccggtggccgccggcgagctggcccgcaaggaggacatcgacgcggtcatcgccatcggggtgctgatccggggcgccacgccccacttcgactacatcgccagcgaggtgtccaaggggctcgcggacctgagcctggagctccgcaagcccatcaccttcggcgtcatcaccgccgacaccctggagcaggccatcgagcgggccgggacgaagcacggcaacaagggctgggaggccgcgctgtccgccatcgagatggccaacctcttcaagagcctgcgctgaggactagtccctgttcccagagcccacttttttttctttttttgaaataaaatagcctgtctttcagatctcaaaggctcttttcagagccaccaaaaaaaaaaaaaaaaaaaaaaaaaaaaaaaaaaaaaaaaaaaaaaaaaaaaaaaaaaaaaaaaaaaaaaaaaaaaaaaaaaaaaaaaaaaaaaaaaaaaa

SEQ ID NO: 691 - RNA, 1694 nt, synthetic construct
  misc_feature 1..1694: note Artificial____HsIgE(1-18)_Ec(J96)-FimH(22-300_F165V)_Linker -PGDGN_Ec(J96)-FimG(24-37)_Linker-SGG_LumSynth(1-154_C37A_N 102D) mRNA opt1
  source 1..1694: mol_type = other RNA
aggagagtcccgcagtcggcgtccagcggctctgcttgttcgtgtgtgtgtcgttgcaggccttattcaagcttaccatggactggacctggatcctgttcctcgtggccgccgcgacccgcgtccacagcttcgcctgcaagaccgccaacggcaccgcgatccccatcgggggcgggagcgccaacgtgtacgtcaacctggccccggtggtgaacgtcggccagaacctcgtggtggacctgtccacgcagatcttctgccacaacgactaccccgagaccatcaccgactacgtcaccctgcagcgcgggagcgcctacggcggcgtgctctccaacttcagcgggacggtgaagtactccggcagctcctaccccttccccaccaccagcgagaccccgcgggtcgtgtacaactcccgcacggacaagccctggcccgtggccctgtacctgacccccgtcagctccgccgggggcgtggcgatcaaggccgggagcctcatcgccgtgctgatcctgcggcagaccaacaactacaactccgacgacttccaggtggtctggaacatctacgcgaacaacgacgtggtggtcccgaccggcggctgcgacgtgagcgcccgcgacgtgacggtcaccctccccgactaccccgggtccgtgcccatcccgctgaccgtgtactgcgccaagagccagaacctgggctactacctctccgggaccacggccgacgccggcaacagcatcttcaccaacaccgcgtccttcagccccgcccagggcgtcggggtgcagctgacccggaacggcacgatcatccccgccaacaacaccgtcagcctgggggccgtgggcacctccgccgtgagcctcgggctgaccgcgaactacgcccgcacgggcggccaggtcaccgccgggaacgtgcagtccatcatcggcgtgaccttcgtctaccagcccggcgacgggaacgccgacgtgaccatcaccgtcaacggcaaggtggtggccaagagcggcgggatgcagatctacgagggcaagctgaccgccgaggggctccgcttcggcatcgtggccagccggttcaaccacgcgctggtcgaccgcctggtggagggggccatcgacgccatcgtgcggcacggcgggcgcgaggaggacatcaccctcgtccgggtgcccggctcctgggagatcccggtggccgccggcgagctggcccgcaaggaggacatcgacgcggtcatcgccatcggggtgctgatccggggcgccacgccccacttcgactacatcgccagcgaggtgtccaaggggctcgcggacctgagcctggagctccgcaagcccatcaccttcggcgtcatcaccgccgacaccctggagcaggccatcgagcgggccgggacgaagcacggcaacaagggctgggaggccgcgctgtccgccatcgagatggccaacctcttcaagagcctgcgctgaggactagtccctgttcccagagcccacttttttttctttttttgaaataaaatagcctgtctttcagatctcaaaggctcttttcagagccaccaaaaaaaaaaaaaaaaaaaaaaaaaaaaaaaaaaaaaaaaaaaaaaaaaaaaaaaaaaaaaaaaaaaaaaaaaaaaaaaaaaaaaaaaaaaaaaaaaaaaa

SEQ ID NO: 692 - RNA, 1721 nt, synthetic construct
  misc_feature 1..1721: note Artificial____HsIgE(1-18)_Ec(J96)-FimH(22-300_N28S_N91S_N24 9Q)_Linker-PGDGN_Ec(J96)-FimG(24-37)_Linker-SGG_Ferritin(5- 167_N19Q) mRNA opt1
  source 1..1721: mol_type = other RNA
aggagagtcccgcagtcggcgtccagcggctctgcttgttcgtgtgtgtgtcgttgcaggccttattcaagcttaccatggactggacctggatcctgttcctcgtggccgccgcgacccgcgtccacagcttcgcctgcaagaccgccagcggcaccgcgatccccatcgggggcgggagcgccaacgtgtacgtcaacctggccccggtggtgaacgtcggccagaacctcgtggtggacctgtccacgcagatcttctgccacaacgactaccccgagaccatcaccgactacgtcaccctgcagcgcgggagcgcctacggcggcgtgctctccagcttcagcgggacggtgaagtactccggcagctcctaccccttccccaccaccagcgagaccccgcgggtcgtgtacaactcccgcacggacaagccctggcccgtggccctgtacctgacccccgtcagctccgccgggggcgtggcgatcaaggccgggagcctcatcgccgtgctgatcctgcggcagaccaacaactacaactccgacgacttccagttcgtctggaacatctacgcgaacaacgacgtggtggtcccgaccggcggctgcgacgtgagcgcccgcgacgtgacggtcaccctccccgactaccccgggtccgtgcccatcccgctgaccgtgtactgcgccaagagccagaacctgggctactacctctccgggaccacggccgacgccggcaacagcatcttcaccaacaccgcgtccttcagccccgcccagggcgtcggggtgcagctgacccggcagggcacgatcatccccgccaacaacaccgtcagcctgggggccgtgggcacctccgccgtgagcctcgggctgaccgcgaactacgcccgcacgggcggccaggtcaccgccgggaacgtgcagtccatcatcggcgtgaccttcgtctaccagcccggcgacgggaacgccgacgtgaccatcaccgtcaacggcaaggtggtggccaagagcggcggggacatcatcaagctcctgaacgagcaggtcaacaaggagatgcagtccagcaacctgtacatgtccatgagctcctggtgctacacccacagcctcgacggcgccgggctgttcctgttcgaccacgccgcggaggagtacgagcacgccaagaagctcatcatcttcctgaacgagaacaacgtgcccgtgcagctgacctccatcagcgccccggagcacaagttcgagggcctcacgcagatcttccagaaggcctacgagcacgagcagcacatctccgagagcatcaacaacatcgtggaccacgccatcaagtccaaggaccacgcgaccttcaacttcctgcagtggtacgtcgccgagcagcacgaggaggaggtgctgttcaaggacatcctcgacaagatcgagctgatcgggaacgagaaccacggcctgtacctcgccgaccagtacgtgaaggggatcgccaagagccgcaagtcctgaggactagtccctgttcccagagcccacttttttttctttttttgaaataaaatagcctgtctttcagatctcaaaggctcttttcagagccaccaaaaaaaaaaaaaaaaaaaaaaaaaaaaaaaaaaaaaaaaaaaaaaaaaaaaaaaaaaaaaaaaaaaaaaaaaaaaaaaaaaaaaaaaaaaaaaaaaaaaa

SEQ ID NO: 693 - RNA, 1721 nt, synthetic construct
  misc_feature 1..1721: note Artificial____HsIgE(1-18)_Ec(J96)-FimH(22-300_N28S_N91S_N24 9Q_N256D)_Linker-PGDGN_Ec(J96)-FimG(24-37)_Linker-SGG_Ferri tin(5-167_N19Q) mRNA opt1
  source 1..1721: mol_type = other RNA
aggagagtcccgcagtcggcgtccagcggctctgcttgttcgtgtgtgtgtcgttgcaggccttattcaagcttaccatggactggacctggatcctgttcctcgtggccgccgcgacccgcgtccacagcttcgcctgcaagaccgccagcggcaccgcgatccccatcgggggcgggagcgccaacgtgtacgtcaacctggccccggtggtgaacgtcggccagaacctcgtggtggacctgtccacgcagatcttctgccacaacgactaccccgagaccatcaccgactacgtcaccctgcagcgcgggagcgcctacggcggcgtgctctccagcttcagcgggacggtgaagtactccggcagctcctaccccttccccaccaccagcgagaccccgcgggtcgtgtacaactcccgcacggacaagccctggcccgtggccctgtacctgacccccgtcagctccgccgggggcgtggcgatcaaggccgggagcctcatcgccgtgctgatcctgcggcagaccaacaactacaactccgacgacttccagttcgtctggaacatctacgcgaacaacgacgtggtggtcccgaccggcggctgcgacgtgagcgcccgcgacgtgacggtcaccctccccgactaccccgggtccgtgcccatcccgctgaccgtgtactgcgccaagagccagaacctgggctactacctctccgggaccacggccgacgccggcaacagcatcttcaccaacaccgcgtccttcagccccgcccagggcgtcggggtgcagctgacccggcagggcacgatcatccccgccgacaacaccgtcagcctgggggccgtgggcacctccgccgtgagcctcgggctgaccgcgaactacgcccgcacgggcggccaggtcaccgccgggaacgtgcagtccatcatcggcgtgaccttcgtctaccagcccggcgacgggaacgccgacgtgaccatcaccgtcaacggcaaggtggtggccaagagcggcggggacatcatcaagctcctgaacgagcaggtcaacaaggagatgcagtccagcaacctgtacatgtccatgagctcctggtgctacacccacagcctcgacggcgccgggctgttcctgttcgaccacgccgcggaggagtacgagcacgccaagaagctcatcatcttcctgaacgagaacaacgtgcccgtgcagctgacctccatcagcgccccggagcacaagttcgagggcctcacgcagatcttccagaaggcctacgagcacgagcagcacatctccgagagcatcaacaacatcgtggaccacgccatcaagtccaaggaccacgcgaccttcaacttcctgcagtggtacgtcgccgagcagcacgaggaggaggtgctgttcaaggacatcctcgacaagatcgagctgatcgggaacgagaaccacggcctgtacctcgccgaccagtacgtgaaggggatcgccaagagccgcaagtcctgaggactagtccctgttcccagagcccacttttttttctttttttgaaataaaatagcctgtctttcagatctcaaaggctcttttcagagccaccaaaaaaaaaaaaaaaaaaaaaaaaaaaaaaaaaaaaaaaaaaaaaaaaaaaaaaaaaaaaaaaaaaaaaaaaaaaaaaaaaaaaaaaaaaaaaaaaaaaaa

SEQ ID NO: 694 - RNA, 1721 nt, synthetic construct
  misc_feature 1..1721: note Artificial____HsIgE(1-18)_Ec(J96)-FimH(22-300_N28S_V48C_L55 C_N91S_N249Q)_Linker-PGDGN_Ec(J96)-FimG(24-37)_Linker-SGG_F erritin(5-167_N19Q) mRNA opt1
  source 1..1721: mol_type = other RNA
aggagagtcccgcagtcggcgtccagcggctctgcttgttcgtgtgtgtgtcgttgcaggccttattcaagcttaccatggactggacctggatcctgttcctcgtggccgccgcgacccgcgtccacagcttcgcctgcaagaccgccagcggcaccgcgatccccatcgggggcgggagcgccaacgtgtacgtcaacctggccccgtgcgtgaacgtcggccagaactgcgtggtggacctgtccacgcagatcttctgccacaacgactaccccgagaccatcaccgactacgtcaccctgcagcgcgggagcgcctacggcggcgtgctctccagcttcagcgggacggtgaagtactccggcagctcctaccccttccccaccaccagcgagaccccgcgggtcgtgtacaactcccgcacggacaagccctggcccgtggccctgtacctgacccccgtcagctccgccgggggcgtggcgatcaaggccgggagcctcatcgccgtgctgatcctgcggcagaccaacaactacaactccgacgacttccagttcgtctggaacatctacgcgaacaacgacgtggtggtcccgaccggcggctgcgacgtgagcgcccgcgacgtgacggtcaccctccccgactaccccgggtccgtgcccatcccgctgaccgtgtactgcgccaagagccagaacctgggctactacctctccgggaccacggccgacgccggcaacagcatcttcaccaacaccgcgtccttcagccccgcccagggcgtcggggtgcagctgacccggcagggcacgatcatccccgccaacaacaccgtcagcctgggggccgtgggcacctccgccgtgagcctcgggctgaccgcgaactacgcccgcacgggcggccaggtcaccgccgggaacgtgcagtccatcatcggcgtgaccttcgtctaccagcccggcgacgggaacgccgacgtgaccatcaccgtcaacggcaaggtggtggccaagagcggcggggacatcatcaagctcctgaacgagcaggtcaacaaggagatgcagtccagcaacctgtacatgtccatgagctcctggtgctacacccacagcctcgacggcgccgggctgttcctgttcgaccacgccgcggaggagtacgagcacgccaagaagctcatcatcttcctgaacgagaacaacgtgcccgtgcagctgacctccatcagcgccccggagcacaagttcgagggcctcacgcagatcttccagaaggcctacgagcacgagcagcacatctccgagagcatcaacaacatcgtggaccacgccatcaagtccaaggaccacgcgaccttcaacttcctgcagtggtacgtcgccgagcagcacgaggaggaggtgctgttcaaggacatcctcgacaagatcgagctgatcgggaacgagaaccacggcctgtacctcgccgaccagtacgtgaaggggatcgccaagagccgcaagtcctgaggactagtccctgttcccagagcccacttttttttctttttttgaaataaaatagcctgtctttcagatctcaaaggctcttttcagagccaccaaaaaaaaaaaaaaaaaaaaaaaaaaaaaaaaaaaaaaaaaaaaaaaaaaaaaaaaaaaaaaaaaaaaaaaaaaaaaaaaaaaaaaaaaaaaaaaaaaaaa

SEQ ID NO: 695 - RNA, 1721 nt, synthetic construct
  misc_feature 1..1721: note Artificial____HsIgE(1-18)_Ec(J96)-FimH(22-300_F165V)_Linker -PGDGN_Ec(J96)-FimG(24-37)_Linker-SGG_Ferritin(5-167_N19Q) mRNA opt1
  source 1..1721: mol_type = other RNA
aggagagtcccgcagtcggcgtccagcggctctgcttgttcgtgtgtgtgtcgttgcaggccttattcaagcttaccatggactggacctggatcctgttcctcgtggccgccgcgacccgcgtccacagcttcgcctgcaagaccgccaacggcaccgcgatccccatcgggggcgggagcgccaacgtgtacgtcaacctggccccggtggtgaacgtcggccagaacctcgtggtggacctgtccacgcagatcttctgccacaacgactaccccgagaccatcaccgactacgtcaccctgcagcgcgggagcgcctacggcggcgtgctctccaacttcagcgggacggtgaagtactccggcagctcctaccccttccccaccaccagcgagaccccgcgggtcgtgtacaactcccgcacggacaagccctggcccgtggccctgtacctgacccccgtcagctccgccgggggcgtggcgatcaaggccgggagcctcatcgccgtgctgatcctgcggcagaccaacaactacaactccgacgacttccaggtggtctggaacatctacgcgaacaacgacgtggtggtcccgaccggcggctgcgacgtgagcgcccgcgacgtgacggtcaccctccccgactaccccgggtccgtgcccatcccgctgaccgtgtactgcgccaagagccagaacctgggctactacctctccgggaccacggccgacgccggcaacagcatcttcaccaacaccgcgtccttcagccccgcccagggcgtcggggtgcagctgacccggaacggcacgatcatccccgccaacaacaccgtcagcctgggggccgtgggcacctccgccgtgagcctcgggctgaccgcgaactacgcccgcacgggcggccaggtcaccgccgggaacgtgcagtccatcatcggcgtgaccttcgtctaccagcccggcgacgggaacgccgacgtgaccatcaccgtcaacggcaaggtggtggccaagagcggcggggacatcatcaagctcctgaacgagcaggtcaacaaggagatgcagtccagcaacctgtacatgtccatgagctcctggtgctacacccacagcctcgacggcgccgggctgttcctgttcgaccacgccgcggaggagtacgagcacgccaagaagctcatcatcttcctgaacgagaacaacgtgcccgtgcagctgacctccatcagcgccccggagcacaagttcgagggcctcacgcagatcttccagaaggcctacgagcacgagcagcacatctccgagagcatcaacaacatcgtggaccacgccatcaagtccaaggaccacgcgaccttcaacttcctgcagtggtacgtcgccgagcagcacgaggaggaggtgctgttcaaggacatcctcgacaagatcgagctgatcgggaacgagaaccacggcctgtacctcgccgaccagtacgtgaaggggatcgccaagagccgcaagtcctgaggactagtccctgttcccagagcccacttttttttctttttttgaaataaaatagcctgtctttcagatctcaaaggctcttttcagagccaccaaaaaaaaaaaaaaaaaaaaaaaaaaaaaaaaaaaaaaaaaaaaaaaaaaaaaaaaaaaaaaaaaaaaaaaaaaaaaaaaaaaaaaaaaaaaaaaaaaaaa

SEQ ID NO: 696 - RNA, 998 nt, synthetic construct
  misc_feature 1..998: note Artificial____Ec(J96)-FimC(1-36)_Ec(J96)-FimC(37-241) mRNA opt1
  source 1..998: mol_type = other RNA
aggagagtcccgcagtcggcgtccagcggctctgcttgttcgtgtgtgtgtcgttgcaggccttattcaagcttaccatgagcaacaagaacgtgaacgtccgcaagtcccaggagatcaccttctgcctgctcgccggcatcctgatgttcatggccatgatggtggcggggcgggccgaggccggcgtggccctgggggccacccgcgtcatctaccccgcgggccagaagcaggtccagctcgccgtgacgaacaacgacgagaacagcacctacctgatccagtcctgggtggagaacgccgacggggtgaaggacggccggttcatcgtgaccccgcccctgttcgccatgaagggcaagaaggagaacaccctccgcatcctggacgcgacgaacaaccagctgccccaggaccgggagagcctcttctggatgaacgtcaaggccatcccctccatggacaagagcaagctgaccgagaacaccctgcagctcgccatcatctcccgcatcaagctgtactaccggccggccaagctggccctcccgcccgaccaggcggccgagaagctgcgcttccggcgcagcgccaactccctgaccctcatcaaccccacgccctactacctgaccgtgaccgagctgaacgccgggacccgggtgctcgagaacgccctggtcccgcccatgggcgagagcacggtgaagctgccctccgacgcggggagcaacatcacctaccgcaccatcaacgactacggcgccctcacccccaagatgacgggggtgatggagtgaggactagtccctgttcccagagcccacttttttttctttttttgaaataaaatagcctgtctttcagatctcaaaggctcttttcagagccaccaaaaaaaaaaaaaaaaaaaaaaaaaaaaaaaaaaaaaaaaaaaaaaaaaaaaaaaaaaaaaaaaaaaaaaaaaaaaaaaaaaaaaaaaaaaaaaaaaaaaa

SEQ ID NO: 697 - RNA, 944 nt, synthetic construct
  misc_feature 1..944: note = Artificial____HsIgE(1-18)_Ec(J96)-FimC(37-241) mRNA opt1
  source 1..944: mol_type = other RNA
aggagagtcccgcagtcggcgtccagcggctctgcttgttcgtgtgtgtgtcgttgcaggccttattcaagcttaccatggactggacctggatcctgttcctcgtggccgccgcgacccgcgtccacagcggcgtggccctgggggccacgcgggtgatctaccccgccggccagaagcaggtccagctggccgtgaccaacaacgacgagaactccacctacctcatccagagctgggtggagaacgcggacggggtcaaggacggccgcttcatcgtgaccccgcccctgttcgccatgaaggggaagaaggagaacacgctgcggatcctcgacgccaccaacaaccagctgccccaggaccgcgagtccctgttctggatgaacgtgaaggccatccccagcatggacaagtccaagctcaccgagaacaccctgcagctggcgatcatcagccggatcaagctctactaccgcccggccaagctggccctgccgcccgaccaggccgccgagaagctccggttccgccggtccgcgaacagcctgacgctgatcaaccccaccccctactacctcaccgtcaccgagctgaacgccggcacgcgcgtgctggagaacgccctcgtgccgcccatgggcgagtccaccgtcaagctgcccagcgacgccgggtccaacatcacctaccggaccatcaacgactacggcgccctgacgcccaagatgaccggggtgatggagtgaggactagtccctgttcccagagcccacttttttttctttttttgaaataaaatagcctgtctttcagatctcaaaggctcttttcagagccaccaaaaaaaaaaaaaaaaaaaaaaaaaaaaaaaaaaaaaaaaaaaaaaaaaaaaaaaaaaaaaaaaaaaaaaaaaaaaaaaaaaaaaaaaaaaaaaaaaaaaa

SEQ ID NO: 698 - RNA, 1175 nt, synthetic construct
  misc_feature 1..1175: note Artificial____Ec(J96)-FimH(1-21)_Ec(J96)-FimH(22-300) mRNA opt1
  source 1..1175: mol_type = other RNA
aggagagtcccgcagtcggcgtccagcggctctgcttgttcgtgtgtgtgtcgttgcaggccttattcaagcttaccatgaagcgcgtgatcaccctgttcgccgtcctcctgatgggctggagcgtgaacgcctggtccttcgcgtgcaagaccgccaacgggacggccatccccatcggcgggggcagcgccaacgtgtacgtcaacctggccccggtggtgaacgtcgggcagaacctcgtggtggacctgtccacccagatcttctgccacaacgactaccccgagaccatcaccgactacgtcacgctgcagcggggcagcgcgtacggcggggtgctctccaacttcagcggcaccgtgaagtactccgggagctcctaccccttccccaccaccagcgagacgccgcgcgtcgtgtacaactcccggaccgacaagccctggcccgtggccctgtacctgacccccgtcagctccgccggcggggtggccatcaaggcgggcagcctcatcgccgtgctgatcctgcgccagaccaacaactacaactccgacgacttccagttcgtctggaacatctacgccaacaacgacgtggtggtcccgacgggcgggtgcgacgtgagcgcccgggacgtgaccgtcaccctccccgactaccccggctccgtgcccatcccgctgaccgtctactgcgccaagagccagaacctggggtactacctctccggcacgaccgcggacgccggcaacagcatcttcaccaacaccgccagcttctcccccgcccagggggtgggcgtgcagctgacgcgcaacgggaccatcatccccgccaacaacaccgtcagcctgggcgcggtggggacctccgccgtgagcctcggcctgacggccaactacgcccggaccggcgggcaggtcaccgccggcaacgtgcagtccatcatcggggtgaccttcgtctaccagtgaggactagtccctgttcccagagcccacttttttttctttttttgaaataaaatagcctgtctttcagatctcaaaggctcttttcagagccaccaaaaaaaaaaaaaaaaaaaaaaaaaaaaaaaaaaaaaaaaaaaaaaaaaaaaaaaaaaaaaaaaaaaaaaaaaaaaaaaaaaaaaaaaaaaaaaaaaaaaa

SEQ ID NO: 699 - RNA, 1166 nt, synthetic construct
  misc_feature 1..1166: note = Artificial____HsIgE(1-18)_Ec(J96)-FimH(22-300) mRNA opt1
  source 1..1166: mol_type = other RNA
aggagagtcccgcagtcggcgtccagcggctctgcttgttcgtgtgtgtgtcgttgcaggccttattcaagcttaccatggactggacctggatcctgttcctcgtggccgccgcgacccgcgtccacagcttcgcctgcaagacggccaacggcaccgccatccccatcgggggcgggtccgccaacgtgtacgtgaacctggcgccggtcgtgaacgtgggccagaacctggtcgtggacctcagcacccagatcttctgccacaacgactaccccgagaccatcacggactacgtgaccctgcagcgggggtccgcctacggcggcgtcctgagcaacttctccgggaccgtgaagtacagcggctccagctaccccttccccaccacgtccgagaccccgcgcgtggtctacaacagccggaccgacaagccctggcccgtggccctctacctgacccccgtgtccagcgccgggggcgtcgcgatcaaggccgggtccctgatcgccgtgctcatcctgcgccagacgaacaactacaacagcgacgacttccagttcgtgtggaacatctacgccaacaacgacgtcgtggtgccgaccggcggctgcgacgtctccgcccgggacgtgaccgtgaccctgcccgactaccccgggagcgtccccatcccgctcacggtgtactgcgcgaagtcccagaacctgggctactacctgagcgggaccaccgccgacgccggcaactccatcttcaccaacacggccagcttcagccccgcccagggcgtcggggtgcagctcacccgcaacggcaccatcatccccgcgaacaacaccgtgtccctgggggccgtcggcacgagcgccgtgtccctggggctcaccgccaactacgcccggaccggcggccaggtgaccgcggggaacgtccagagcatcatcggcgtgacgttcgtgtaccagtgaggactagtccctgttcccagagcccacttttttttctttttttgaaataaaatagcctgtctttcagatctcaaaggctcttttcagagccaccaaaaaaaaaaaaaaaaaaaaaaaaaaaaaaaaaaaaaaaaaaaaaaaaaaaaaaaaaaaaaaaaaaaaaaaaaaaaaaaaaaaaaaaaaaaaaaaaaaaaa

SEQ ID NO: 700 - RNA, 1172 nt, synthetic construct
  misc_feature 1..1172: note = Artificial____MmIgK(1-20)_Ec(J96)-FimH(22-300) mRNA opt1
  source 1..1172: mol_type = other RNA
aggagagtcccgcagtcggcgtccagcggctctgcttgttcgtgtgtgtgtcgttgcaggccttattcaagcttaccatggagaccgacaccctgctcctgtgggtgctgctcctgtgggtccccggcagcacggggttcgcctgcaagaccgccaacggcaccgcgatcccgatcgggggcgggtccgccaacgtgtacgtgaacctggcccccgtcgtgaacgtgggccagaacctcgtcgtggacctgagcacccagatcttctgccacaacgactaccccgagacgatcaccgactacgtgaccctgcagcgcggctccgcctacgggggcgtcctcagcaacttctccgggaccgtgaagtacagcggctccagctaccccttcccgacgacctccgagacgccccgggtggtctacaacagccgcaccgacaagccctggcccgtggccctgtacctgaccccggtgtccagcgccgggggcgtcgcgatcaaggccggctccctcatcgccgtgctgatcctgcggcagaccaacaactacaacagcgacgacttccagttcgtgtggaacatctacgcgaacaacgacgtcgtggtgcccaccgggggctgcgacgtctccgcccgcgacgtgaccgtgacgctccccgactaccccgggagcgtcccgatccccctgaccgtgtactgcgccaagtcccagaacctgggctactacctcagcggcaccaccgccgacgccgggaactccatcttcacgaacaccgcgagcttcagccccgcccagggcgtcggggtgcagctgacccggaacggcaccatcatccccgccaacaacacggtgtccctgggggccgtcggcaccagcgccgtgtccctcggcctgaccgcgaactacgcccgcaccgggggccaggtgacggccgggaacgtccagagcatcatcggcgtgaccttcgtgtaccagtgaggactagtccctgttcccagagcccacttttttttctttttttgaaataaaatagcctgtctttcagatctcaaaggctcttttcagagccaccaaaaaaaaaaaaaaaaaaaaaaaaaaaaaaaaaaaaaaaaaaaaaaaaaaaaaaaaaaaaaaaaaaaaaaaaaaaaaaaaaaaaaaaaaaaaaaaaaaaaa

SEQ ID NO: 701 - RNA, 1232 nt, synthetic construct
  misc_feature 1..1232: note Artificial____Ec(J96)-FimH(1-21)_Ec(J96)-FimH(22-300)_Linke r-PGDGN_Ec(J96)-FimG(24-37) mRNA opt1
  source 1..1232: mol_type = other RNA
aggagagtcccgcagtcggcgtccagcggctctgcttgttcgtgtgtgtgtcgttgcaggccttattcaagcttaccatgaagcgcgtgatcaccctgttcgccgtcctcctgatgggctggagcgtgaacgcctggtccttcgcgtgcaagaccgccaacgggacggccatccccatcggcgggggcagcgccaacgtgtacgtcaacctggccccggtggtgaacgtcgggcagaacctcgtggtggacctgtccacccagatcttctgccacaacgactaccccgagaccatcaccgactacgtcacgctgcagcggggcagcgcgtacggcggggtgctctccaacttcagcggcaccgtgaagtactccgggagctcctaccccttccccaccaccagcgagacgccgcgcgtcgtgtacaactcccggaccgacaagccctggcccgtggccctgtacctgacccccgtcagctccgccggcggggtggccatcaaggcgggcagcctcatcgccgtgctgatcctgcgccagaccaacaactacaactccgacgacttccagttcgtctggaacatctacgccaacaacgacgtggtggtcccgacgggcgggtgcgacgtgagcgcccgggacgtgaccgtcaccctccccgactaccccggctccgtgcccatcccgctgaccgtctactgcgccaagagccagaacctggggtactacctctccggcacgaccgcggacgccggcaacagcatcttcaccaacaccgccagcttctcccccgcccagggggtgggcgtgcagctgacgcgcaacgggaccatcatccccgccaacaacaccgtcagcctgggcgcggtggggacctccgccgtgagcctcggcctgacggccaactacgcccggaccggcgggcaggtcaccgccggcaacgtgcagtccatcatcggggtgaccttcgtctaccagcccggcgacgggaacgcggacgtgacgatcaccgtgaacggcaaggtcgtggccaagtgaggactagtccctgttcccagagcccacttttttttctttttttgaaataaaatagcctgtctttcagatctcaaaggctcttttcagagccaccaaaaaaaaaaaaaaaaaaaaaaaaaaaaaaaaaaaaaaaaaaaaaaaaaaaaaaaaaaaaaaaaaaaaaaaaaaaaaaaaaaaaaaaaaaaaaaaaaaaaa

SEQ ID NO: 702 - RNA, 1223 nt, synthetic construct
  misc_feature 1..1223: note Artificial____HsIgE(1-18)_Ec(J96)-FimH(22-300)_Linker-PGDGN _Ec(J96)-FimG(24-37) mRNA opt1
  source 1..1223: mol_type = other RNA
aggagagtcccgcagtcggcgtccagcggctctgcttgttcgtgtgtgtgtcgttgcaggccttattcaagcttaccatggactggacctggatcctgttcctcgtggccgccgcgacccgcgtccacagcttcgcctgcaagacggccaacggcaccgccatccccatcgggggcgggtccgccaacgtgtacgtgaacctggcgccggtcgtgaacgtgggccagaacctggtcgtggacctcagcacccagatcttctgccacaacgactaccccgagaccatcacggactacgtgaccctgcagcgggggtccgcctacggcggcgtcctgagcaacttctccgggaccgtgaagtacagcggctccagctaccccttccccaccacgtccgagaccccgcgcgtggtctacaacagccggaccgacaagccctggcccgtggccctctacctgacccccgtgtccagcgccgggggcgtcgcgatcaaggccgggtccctgatcgccgtgctcatcctgcgccagacgaacaactacaacagcgacgacttccagttcgtgtggaacatctacgccaacaacgacgtcgtggtgccgaccggcggctgcgacgtctccgcccgggacgtgaccgtgaccctgcccgactaccccgggagcgtccccatcccgctcacggtgtactgcgcgaagtcccagaacctgggctactacctgagcgggaccaccgccgacgccggcaactccatcttcaccaacacggccagcttcagccccgcccagggcgtcggggtgcagctcacccgcaacggcaccatcatccccgcgaacaacaccgtgtccctgggggccgtcggcacgagcgccgtgtccctggggctcaccgccaactacgcccggaccggcggccaggtgaccgcggggaacgtccagagcatcatcggcgtgacgttcgtgtaccagcccggggacggcaacgccgacgtcaccatcaccgtgaacgggaaggtggtcgccaagtgaggactagtccctgttcccagagcccacttttttttctttttttgaaataaaatagcctgtctttcagatctcaaaggctcttttcagagccaccaaaaaaaaaaaaaaaaaaaaaaaaaaaaaaaaaaaaaaaaaaaaaaaaaaaaaaaaaaaaaaaaaaaaaaaaaaaaaaaaaaaaaaaaaaaaaaaaaaaaa

SEQ ID NO: 703 - RNA, 1229 nt, synthetic construct
  misc_feature 1..1229: note Artificial____HsIgE(1-18)_Ec(J96)-FimH(22-300)_Linker-G4SGG _Ec(J96)-FimG(24-37) mRNA opt1
  source 1..1229: mol_type = other RNA
aggagagtcccgcagtcggcgtccagcggctctgcttgttcgtgtgtgtgtcgttgcaggccttattcaagcttaccatggactggacctggatcctgttcctcgtggccgccgcgacccgcgtccacagcttcgcctgcaagacggccaacggcaccgccatccccatcgggggcgggtccgccaacgtgtacgtgaacctggcgccggtcgtgaacgtgggccagaacctggtcgtggacctcagcacccagatcttctgccacaacgactaccccgagaccatcacggactacgtgaccctgcagcgggggtccgcctacggcggcgtcctgagcaacttctccgggaccgtgaagtacagcggctccagctaccccttccccaccacgtccgagaccccgcgcgtggtctacaacagccggaccgacaagccctggcccgtggccctctacctgacccccgtgtccagcgccgggggcgtcgcgatcaaggccgggtccctgatcgccgtgctcatcctgcgccagacgaacaactacaacagcgacgacttccagttcgtgtggaacatctacgccaacaacgacgtcgtggtgccgaccggcggctgcgacgtctccgcccgggacgtgaccgtgaccctgcccgactaccccgggagcgtccccatcccgctcacggtgtactgcgcgaagtcccagaacctgggctactacctgagcgggaccaccgccgacgccggcaactccatcttcaccaacacggccagcttcagccccgcccagggcgtcggggtgcagctcacccgcaacggcaccatcatccccgcgaacaacaccgtgtccctgggggccgtcggcacgagcgccgtgtccctggggctcaccgccaactacgcccggaccggcggccaggtgaccgcggggaacgtccagagcatcatcggcgtgacgttcgtgtaccagggcgggggcgggtccggcggggccgacgtcaccatcaccgtgaacggcaaggtggtcgccaagtgaggactagtccctgttcccagagcccacttttttttctttttttgaaataaaatagcctgtctttcagatctcaaaggctcttttcagagccaccaaaaaaaaaaaaaaaaaaaaaaaaaaaaaaaaaaaaaaaaaaaaaaaaaaaaaaaaaaaaaaaaaaaaaaaaaaaaaaaaaaaaaaaaaaaaaaaaaaaaa

SEQ ID NO: 704 - RNA, 1229 nt, synthetic construct
  misc_feature 1..1229: note Artificial____MmIgK(1-20)_Ec(J96)-FimH(22-300)_Linker-PGDGN _Ec(J96)-FimG(24-37) mRNA opt1
  source 1..1229: mol_type = other RNA
aggagagtcccgcagtcggcgtccagcggctctgcttgttcgtgtgtgtgtcgttgcaggccttattcaagcttaccatggagaccgacaccctgctcctgtgggtgctgctcctgtgggtccccggcagcacggggttcgcctgcaagaccgccaacggcaccgcgatcccgatcgggggcgggtccgccaacgtgtacgtgaacctggcccccgtcgtgaacgtgggccagaacctcgtcgtggacctgagcacccagatcttctgccacaacgactaccccgagacgatcaccgactacgtgaccctgcagcgcggctccgcctacgggggcgtcctcagcaacttctccgggaccgtgaagtacagcggctccagctaccccttcccgacgacctccgagacgccccgggtggtctacaacagccgcaccgacaagccctggcccgtggccctgtacctgaccccggtgtccagcgccgggggcgtcgcgatcaaggccggctccctcatcgccgtgctgatcctgcggcagaccaacaactacaacagcgacgacttccagttcgtgtggaacatctacgcgaacaacgacgtcgtggtgcccaccgggggctgcgacgtctccgcccgcgacgtgaccgtgacgctccccgactaccccgggagcgtcccgatccccctgaccgtgtactgcgccaagtcccagaacctgggctactacctcagcggcaccaccgccgacgccgggaactccatcttcacgaacaccgcgagcttcagccccgcccagggcgtcggggtgcagctgacccggaacggcaccatcatccccgccaacaacacggtgtccctgggggccgtcggcaccagcgccgtgtccctcggcctgaccgcgaactacgcccgcaccgggggccaggtgacggccgggaacgtccagagcatcatcggcgtgaccttcgtgtaccagccgggggacggcaacgccgacgtcaccatcaccgtgaacggcaaggtggtcgccaagtgaggactagtccctgttcccagagcccacttttttttctttttttgaaataaaatagcctgtctttcagatctcaaaggctcttttcagagccaccaaaaaaaaaaaaaaaaaaaaaaaaaaaaaaaaaaaaaaaaaaaaaaaaaaaaaaaaaaaaaaaaaaaaaaaaaaaaaaaaaaaaaaaaaaaaaaaaaaaaa

SEQ ID NO: 705 - RNA, 1229 nt, synthetic construct
  misc_feature 1..1229: note Artificial____MmIgK(1-20)_Ec(536)-FimH(22-300)_Linker-PGDGN _Ec(J96)-FimG(24-37) mRNA opt1
  source 1..1229: mol_type = other RNA
aggagagtcccgcagtcggcgtccagcggctctgcttgttcgtgtgtgtgtcgttgcaggccttattcaagcttaccatggagaccgacaccctgctcctgtgggtgctgctcctgtgggtccccggcagcacggggttcgcctgcaagaccgccaacggcaccgcgatcccgatcgggggcgggtccgccaacgtgtacgtgaacctggcccccgccgtcaacgtgggccagaacctcgtggtcgacctgagcacccagatcttctgccacaacgactaccccgagacgatcaccgactacgtgaccctgcagcgcggctccgcctacgggggcgtgctcagctccttcagcgggaccgtcaagtacaacggctccagctaccccttcccgacgacctccgagacgccccgggtggtgtacaacagccgcaccgacaagccctggcccgtcgcgctgtacctgaccccggtgtccagcgccgggggcgtggccatcaaggccggctccctcatcgcggtcctgatcctgcggcagaccaacaactacaacagcgacgacttccagttcgtgtggaacatctacgccaacaacgacgtggtcgtgcccaccgggggctgcgacgtgtccgcccgcgacgtcaccgtgacgctccccgactaccccgggagcgtgccgatccccctgaccgtctactgcgccaagtcccagaacctgggctactacctcagcggcaccaccgccgacgcggggaactccatcttcacgaacaccgccagcttcagccccgcccagggcgtgggggtccagctgacccggaacggcaccatcatccccgccaacaacacggtgtccctgggggccgtgggcaccagcgcggtctccctcggcctgaccgccaactacgcccgcaccgggggccaggtgacggccgggaacgtgcagagcatcatcggcgtcaccttcgtgtaccagccgggggacggcaacgccgacgtgaccatcaccgtcaacggcaaggtggtggcgaagtgaggactagtccctgttcccagagcccacttttttttctttttttgaaataaaatagcctgtctttcagatctcaaaggctcttttcagagccaccaaaaaaaaaaaaaaaaaaaaaaaaaaaaaaaaaaaaaaaaaaaaaaaaaaaaaaaaaaaaaaaaaaaaaaaaaaaaaaaaaaaaaaaaaaaaaaaaaaaaa

SEQ ID NO: 706 - RNA, 1253 nt, synthetic construct
  misc_feature 1..1253: note Artificial____HsIgE(1-18)_Ec(J96)-FimH(22-300)_Linker-(G4S) 3_Ec(J96)-FimC(135-148) mRNA opt1
  source 1..1253: mol_type = other RNA
aggagagtcccgcagtcggcgtccagcggctctgcttgttcgtgtgtgtgtcgttgcaggccttattcaagcttaccatggactggacctggatcctgttcctcgtggccgccgcgacccgcgtccacagcttcgcctgcaagacggccaacggcaccgccatccccatcgggggcgggtccgccaacgtgtacgtgaacctggcgccggtcgtgaacgtgggccagaacctggtcgtggacctcagcacccagatcttctgccacaacgactaccccgagaccatcacggactacgtgaccctgcagcgggggtccgcctacggcggcgtcctgagcaacttctccgggaccgtgaagtacagcggctccagctaccccttccccaccacgtccgagaccccgcgcgtggtctacaacagccggaccgacaagccctggcccgtggccctctacctgacccccgtgtccagcgccgggggcgtcgcgatcaaggccgggtccctgatcgccgtgctcatcctgcgccagacgaacaactacaacagcgacgacttccagttcgtgtggaacatctacgccaacaacgacgtcgtggtgccgaccggcggctgcgacgtctccgcccgggacgtgaccgtgaccctgcccgactaccccgggagcgtccccatcccgctcacggtgtactgcgcgaagtcccagaacctgggctactacctgagcgggaccaccgccgacgccggcaactccatcttcaccaacacggccagcttcagccccgcccagggcgtcggggtgcagctcacccgcaacggcaccatcatccccgcgaacaacaccgtgtccctgggggccgtcggcacgagcgccgtgtccctggggctcaccgccaactacgcccggaccggcggccaggtgaccgcggggaacgtccagagcatcatcggcgtgacgttcgtgtaccagggcgggggcgggtccggcgggggcgggagcggcgggggcggctccaccgagaacaccctgcagctggccatcatcagccgcatcaagtgaggactagtccctgttcccagagcccacttttttttctttttttgaaataaaatagcctgtctttcagatctcaaaggctcttttcagagccaccaaaaaaaaaaaaaaaaaaaaaaaaaaaaaaaaaaaaaaaaaaaaaaaaaaaaaaaaaaaaaaaaaaaaaaaaaaaaaaaaaaaaaaaaaaaaaaaaaaaaa

SEQ ID NO: 707 - RNA, 1676 nt, synthetic construct
  misc_feature 1..1676: note Artificial____LumSynth(1-154_C37A_N102D)_Linker(GGS)4-GGG_E c(J96)-FimH(22-300)_Linker-PGDGN_Ec(J96)-FimG(24-37) mRNA opt1
  source 1..1676: mol_type = other RNA
aggagagtcccgcagtcggcgtccagcggctctgcttgttcgtgtgtgtgtcgttgcaggccttattcaagcttaccatgcagatctacgagggcaagctgaccgccgaggggctccgcttcggcatcgtggccagccggttcaaccacgcgctggtcgaccgcctggtggagggggccatcgacgccatcgtgcggcacggcgggcgcgaggaggacatcaccctcgtccgggtgcccggctcctgggagatcccggtggccgccggcgagctggcgcgcaaggaggacatcgacgccgtcatcgccatcggggtgctgatccggggcgccacgccccacttcgactacatcgcgagcgaggtgtccaaggggctcgccgacctgagcctggagctccgcaagcccatcaccttcggcgtcatcaccgccgacaccctggagcaggccatcgagcgggccgggacgaagcacggcaacaagggctgggaggcggccctgtccgccatcgagatggccaacctcttcaagagcctgcgcgggggctccgggggcagcggcgggtccggcgggagcggcgggggcttcgcctgcaagaccgcgaacggcaccgccatccccatcgggggcgggtccgccaacgtgtacgtgaacctggccccggtcgtgaacgtgggccagaacctcgtcgtggacctgagcacccagatcttctgccacaacgactaccccgagacgatcaccgactacgtgaccctgcagcgggggtccgcctacggcggcgtcctcagcaacttctccgggaccgtgaagtacagcggctccagctaccccttccccacgacctccgagaccccgcgcgtggtctacaacagccggaccgacaagccctggcccgtggcgctgtacctgacgcccgtgagctccgccgggggcgtcgccatcaaggccgggagcctcatcgccgtgctgatcctgcgccagaccaacaactacaactccgacgacttccagttcgtctggaacatctacgcgaacaacgacgtggtggtcccgaccggcggctgcgacgtgagcgcccgggacgtgaccgtcacgctccccgactaccccgggtccgtgcccatcccgctgaccgtgtactgcgccaagagccagaacctgggctactacctctccgggaccaccgccgacgcgggcaacagcatcttcacgaacaccgcctccttcagccccgcccagggcgtcggggtgcagctgacccgcaacggcaccatcatccccgccaacaacacggtgtccctgggggccgtcggcaccagcgcggtgtccctcgggctgaccgccaactacgcccggaccggcggccaggtgacggccgggaacgtccagagcatcatcggcgtgaccttcgtgtaccagcccggggacggcaacgccgacgtcaccatcaccgtgaacgggaaggtggtcgcgaagtgaggactagtccctgttcccagagcccacttttttttctttttttgaaataaaatagcctgtctttcagatctcaaaggctcttttcagagccaccaaaaaaaaaaaaaaaaaaaaaaaaaaaaaaaaaaaaaaaaaaaaaaaaaaaaaaaaaaaaaaaaaaaaaaaaaaaaaaaaaaaaaaaaaaaaaaaaaaaaa

SEQ ID NO: 708 - RNA, 1694 nt, synthetic construct
  misc_feature 1..1694: note Artificial____HsIgE(1-18)_Ec(J96)-FimH(22-300)_Linker-PGDGN _Ec(J96)-FimG(24-37)_Linker-SGG_LumSynth(1-154_C37A_N102D) mRNA opt1
  source 1..1694: mol_type = other RNA
aggagagtcccgcagtcggcgtccagcggctctgcttgttcgtgtgtgtgtcgttgcaggccttattcaagcttaccatggactggacctggatcctgttcctcgtggccgccgcgacccgcgtccacagcttcgcctgcaagacggccaacggcaccgccatccccatcgggggcgggtccgccaacgtgtacgtgaacctggcgccggtcgtgaacgtgggccagaacctggtcgtggacctcagcacccagatcttctgccacaacgactaccccgagaccatcacggactacgtgaccctgcagcgggggtccgcctacggcggcgtcctgagcaacttctccgggaccgtgaagtacagcggctccagctaccccttccccaccacgtccgagaccccgcgcgtggtctacaacagccggaccgacaagccctggcccgtggccctctacctgacccccgtgtccagcgccgggggcgtcgcgatcaaggccgggtccctgatcgccgtgctcatcctgcgccagacgaacaactacaacagcgacgacttccagttcgtgtggaacatctacgccaacaacgacgtcgtggtgccgaccggcggctgcgacgtctccgcccgggacgtgaccgtgaccctgcccgactaccccgggagcgtccccatcccgctcacggtgtactgcgcgaagtcccagaacctgggctactacctgagcgggaccaccgccgacgccggcaactccatcttcaccaacacggccagcttcagccccgcccagggcgtcggggtgcagctcacccgcaacggcaccatcatccccgcgaacaacaccgtgtccctgggggccgtcggcacgagcgccgtgtccctggggctcaccgccaactacgcccggaccggcggccaggtgaccgcggggaacgtccagagcatcatcggcgtgacgttcgtgtaccagcccggggacggcaacgccgacgtcaccatcaccgtgaacgggaaggtggtcgccaagtccggcggcatgcagatctacgaggggaagctgaccgccgagggcctgcgcttcgggatcgtggccagccggttcaaccacgcgctcgtggaccgcctggtcgagggcgccatcgacgccatcgtgcggcacgggggccgcgaggaggacatcacgctggtgcgggtcccgggctcctgggagatccccgtggccgcgggggagctcgcccgcaaggaggacatcgacgccgtgatcgccatcggcgtcctgatccgcggggccacgccccacttcgactacatcgcgagcgaggtgtccaagggcctggccgacctcagcctggagctgcggaagcccatcaccttcggcgtgatcaccgccgacaccctcgagcaggccatcgagcgggccgggaccaagcacggcaacaaggggtgggaggcggccctgtccgccatcgagatggccaacctgttcaagagcctccgctgaggactagtccctgttcccagagcccacttttttttctttttttgaaataaaatagcctgtctttcagatctcaaaggctcttttcagagccaccaaaaaaaaaaaaaaaaaaaaaaaaaaaaaaaaaaaaaaaaaaaaaaaaaaaaaaaaaaaaaaaaaaaaaaaaaaaaaaaaaaaaaaaaaaaaaaaaaaaaa

SEQ ID NO: 709 - RNA, 1721 nt, synthetic construct
  misc_feature 1..1721: note Artificial____HsIgE(1-18)_Ec(J96)-FimH(22-300)_Linker-PGDGN _Ec(J96)-FimG(24-37)_Linker-SGG_Ferritin(5-167_N19Q) mRNA opt1
  source 1..1721: mol_type = other RNA
aggagagtcccgcagtcggcgtccagcggctctgcttgttcgtgtgtgtgtcgttgcaggccttattcaagcttaccatggactggacctggatcctgttcctcgtggccgccgcgacccgcgtccacagcttcgcctgcaagacggccaacggcaccgccatccccatcgggggcgggtccgccaacgtgtacgtgaacctggcgccggtcgtgaacgtgggccagaacctggtcgtggacctcagcacccagatcttctgccacaacgactaccccgagaccatcacggactacgtgaccctgcagcgggggtccgcctacggcggcgtcctgagcaacttctccgggaccgtgaagtacagcggctccagctaccccttccccaccacgtccgagaccccgcgcgtggtctacaacagccggaccgacaagccctggcccgtggccctctacctgacccccgtgtccagcgccgggggcgtcgcgatcaaggccgggtccctgatcgccgtgctcatcctgcgccagacgaacaactacaacagcgacgacttccagttcgtgtggaacatctacgccaacaacgacgtcgtggtgccgaccggcggctgcgacgtctccgcccgggacgtgaccgtgaccctgcccgactaccccgggagcgtccccatcccgctcacggtgtactgcgcgaagtcccagaacctgggctactacctgagcgggaccaccgccgacgccggcaactccatcttcaccaacacggccagcttcagccccgcccagggcgtcggggtgcagctcacccgcaacggcaccatcatccccgcgaacaacaccgtgtccctgggggccgtcggcacgagcgccgtgtccctggggctcaccgccaactacgcccggaccggcggccaggtgaccgcggggaacgtccagagcatcatcggcgtgacgttcgtgtaccagcccggggacggcaacgccgacgtcaccatcaccgtgaacgggaaggtggtcgccaagtccggcggcgacatcatcaagctgctgaacgagcaggtcaacaaggagatgcagagctccaacctctacatgagcatgtccagctggtgctacacccactccctggacggggccggcctgttcctcttcgaccacgccgcggaggagtacgagcacgccaagaagctgatcatcttcctgaacgagaacaacgtgccggtgcagctcacgagcatctccgcccccgagcacaagttcgaggggctgacccagatcttccagaaggcctacgagcacgagcagcacatcagcgagtccatcaacaacatcgtggaccacgcgatcaagagcaaggaccacgccaccttcaacttcctgcagtggtacgtggccgagcagcacgaggaggaggtcctcttcaaggacatcctggacaagatcgagctgatcggcaacgagaaccacgggctctacctggccgaccagtacgtgaagggcatcgccaagtcccgcaagagctgaggactagtccctgttcccagagcccacttttttttctttttttgaaataaaatagcctgtctttcagatctcaaaggctcttttcagagccaccaaaaaaaaaaaaaaaaaaaaaaaaaaaaaaaaaaaaaaaaaaaaaaaaaaaaaaaaaaaaaaaaaaaaaaaaaaaaaaaaaaaaaaaaaaaaaaaaaaaaa

SEQ ID NO: 710 - RNA, 1751 nt, synthetic construct
  misc_feature 1..1751: note Artificial____MmIgK(1-20)_Ec(J96)-FimH(22-300)_Linker-PGDGN _Ec(J96)-FimG(24-37)_Linker-(GGS)4_Ferritin(5-166) mRNA opt1
  source 1..1751: mol_type = other RNA
aggagagtcccgcagtcggcgtccagcggctctgcttgttcgtgtgtgtgtcgttgcaggccttattcaagcttaccatggagaccgacaccctgctcctgtgggtgctgctcctgtgggtccccggcagcacggggttcgcctgcaagaccgccaacggcaccgcgatcccgatcgggggcgggtccgccaacgtgtacgtgaacctggcccccgtcgtgaacgtgggccagaacctcgtcgtggacctgagcacccagatcttctgccacaacgactaccccgagacgatcaccgactacgtgaccctgcagcgcggctccgcctacgggggcgtcctcagcaacttctccgggaccgtgaagtacagcggctccagctaccccttcccgacgacctccgagacgccccgggtggtctacaacagccgcaccgacaagccctggcccgtggccctgtacctgaccccggtgtccagcgccgggggcgtcgcgatcaaggccggctccctcatcgccgtgctgatcctgcggcagaccaacaactacaacagcgacgacttccagttcgtgtggaacatctacgcgaacaacgacgtcgtggtgcccaccgggggctgcgacgtctccgcccgcgacgtgaccgtgacgctccccgactaccccgggagcgtcccgatccccctgaccgtgtactgcgccaagtcccagaacctgggctactacctcagcggcaccaccgccgacgccgggaactccatcttcacgaacaccgcgagcttcagccccgcccagggcgtcggggtgcagctgacccggaacggcaccatcatccccgccaacaacacggtgtccctgggggccgtcggcaccagcgccgtgtccctcggcctgaccgcgaactacgcccgcaccgggggccaggtgacggccgggaacgtccagagcatcatcggcgtgaccttcgtgtaccagccgggggacggcaacgccgacgtcaccatcaccgtgaacggcaaggtggtcgccaagggcgggtccgggggcagcgggggctccggcgggagcgacatcatcaagctgctcaacgagcaggtcaacaaggagatgaactccagcaacctgtacatgtccatgagctcctggtgctacacgcacagcctggacggcgcgggcctcttcctgttcgaccacgccgccgaggagtacgagcacgccaagaagctgatcatcttcctcaacgagaacaacgtgcccgtgcagctgacctccatcagcgcccccgagcacaagttcgaggggctgacccagatcttccagaaggcgtacgagcacgagcagcacatctccgagagcatcaacaacatcgtggaccacgccatcaagtccaaggaccacgccaccttcaacttcctccagtggtacgtggccgagcagcacgaggaggaggtcctgttcaaggacatcctggacaagatcgagctcatcggcaacgagaaccacgggctgtacctggcggaccagtacgtgaagggcatcgccaagagccggaagtgaggactagtccctgttcccagagcccacttttttttctttttttgaaataaaatagcctgtctttcagatctcaaaggctcttttcagagccaccaaaaaaaaaaaaaaaaaaaaaaaaaaaaaaaaaaaaaaaaaaaaaaaaaaaaaaaaaaaaaaaaaaaaaaaaaaaaaaaaaaaaaaaaaaaaaaaaaaaaa

SEQ ID NO: 711 - RNA, 1394 nt, synthetic construct
  misc_feature 1..1394: note Artificial____HsIgE(1-18)_Ec(J96)-FimH(22-300)_Linker-PGDGN _Ec(J96)-FimG(24-37)_TMdomain-HA(510-566) mRNA opt1
  source 1..1394: mol_type = other RNA
aggagagtcccgcagtcggcgtccagcggctctgcttgttcgtgtgtgtgtcgttgcaggccttattcaagcttaccatggactggacctggatcctgttcctcgtggccgccgcgacccgcgtccacagcttcgcctgcaagacggccaacggcaccgccatccccatcgggggcgggtccgccaacgtgtacgtgaacctggcgccggtcgtgaacgtgggccagaacctggtcgtggacctcagcacccagatcttctgccacaacgactaccccgagaccatcacggactacgtgaccctgcagcgggggtccgcctacggcggcgtcctgagcaacttctccgggaccgtgaagtacagcggctccagctaccccttccccaccacgtccgagaccccgcgcgtggtctacaacagccggaccgacaagccctggcccgtggccctctacctgacccccgtgtccagcgccgggggcgtcgcgatcaaggccgggtccctgatcgccgtgctcatcctgcgccagacgaacaactacaacagcgacgacttccagttcgtgtggaacatctacgccaacaacgacgtcgtggtgccgaccggcggctgcgacgtctccgcccgggacgtgaccgtgaccctgcccgactaccccgggagcgtccccatcccgctcacggtgtactgcgcgaagtcccagaacctgggctactacctgagcgggaccaccgccgacgccggcaactccatcttcaccaacacggccagcttcagccccgcccagggcgtcggggtgcagctcacccgcaacggcaccatcatccccgcgaacaacaccgtgtccctgggggccgtcggcacgagcgccgtgtccctggggctcaccgccaactacgcccggaccggcggccaggtgaccgcggggaacgtccagagcatcatcggcgtgacgttcgtgtaccagcccggggacggcaacgccgacgtcaccatcaccgtgaacgggaaggtggtcgccaaggccaagctgaaccgcgaggagatcgacggcgtgaagctggagtccacccggatctaccagatcctcgccatctacagcacggtggcgtccagcctggtcctggtggtgtccctcggcgccatcagcttctggatgtgctccaacgggagcctgcagtgccgcatctgcatctgaggactagtccctgttcccagagcccacttttttttctttttttgaaataaaatagcctgtctttcagatctcaaaggctcttttcagagccaccaaaaaaaaaaaaaaaaaaaaaaaaaaaaaaaaaaaaaaaaaaaaaaaaaaaaaaaaaaaaaaaaaaaaaaaaaaaaaaaaaaaaaaaaaaaaaaaaaaaaa

SEQ ID NO: 712 - RNA, 1727 nt, synthetic construct
  misc_feature 1..1727: note Artificial____HsIgE(1-18)_LumSynth(1-154_C37A_N102D)_Linker (GGS)4-GGG_Ec(J96)-FimH(22-300)_Linker-PGDGN_Ec(J96)-FimG(2 4-37) mRNA opt1
  source 1..1727: mol_type = other RNA
aggagagtcccgcagtcggcgtccagcggctctgcttgttcgtgtgtgtgtcgttgcaggccttattcaagcttaccatggactggacctggatcctgttcctcgtggccgccgcgacccgcgtccacagccagatctacgagggcaagctgacggccgaggggctgcggttcggcatcgtggcctcccgcttcaaccacgccctcgtggaccggctggtcgagggggccatcgacgcgatcgtgcgccacggcgggcgggaggaggacatcaccctggtgcgcgtccccggcagctgggagatcccggtggccgccggcgagctcgcccggaaggaggacatcgacgcggtgatcgccatcggggtcctgatccgcggcgccacgccccacttcgactacatcgcctccgaggtgagcaaggggctggccgacctctccctggagctgcggaagcccatcaccttcggcgtgatcaccgcggacaccctcgagcaggccatcgagcgcgccgggaccaagcacggcaacaagggctgggaggccgccctgagcgcgatcgagatggccaacctgttcaagtccctccgcgggggcagcgggggctccggcgggagcggcgggtccggcgggggcttcgcctgcaagaccgccaacggcacggccatccccatcgggggcgggagcgcgaacgtctacgtgaacctggccccggtggtcaacgtgggccagaacctggtggtcgacctctccacccagatcttctgccacaacgactaccccgagaccatcaccgactacgtgacgctgcagcgggggagcgcctacggcggcgtgctgtccaacttcagcgggaccgtcaagtactccggcagctcctaccccttccccaccaccagcgagacgccgcgggtggtgtacaacagccgcaccgacaagccctggcccgtcgccctctacctgacccccgtgtccagcgccgggggcgtcgcgatcaaggccgggtccctgatcgccgtgctcatcctgcggcagaccaacaactacaacagcgacgacttccagttcgtgtggaacatctacgccaacaacgacgtcgtggtgccgacgggcggctgcgacgtctccgcgcgcgacgtgaccgtgaccctgcccgactaccccgggagcgtccccatcccgctcaccgtgtactgcgccaagtcccagaacctgggctactacctgagcgggacgaccgccgacgccggcaactccatcttcaccaacaccgccagcttctcccccgcgcagggcgtgggggtccagctcacgcggaacggcaccatcatccccgccaacaacaccgtgagcctgggggccgtgggcacctccgccgtcagcctggggctcacggccaactacgcgcgcaccggcggccaggtgaccgccgggaacgtgcagtccatcatcggcgtcaccttcgtgtaccagcccggggacggcaacgccgacgtgacgatcaccgtcaacgggaaggtggtggccaagtgaggactagtccctgttcccagagcccacttttttttctttttttgaaataaaatagcctgtctttcagatctcaaaggctcttttcagagccaccaaaaaaaaaaaaaaaaaaaaaaaaaaaaaaaaaaaaaaaaaaaaaaaaaaaaaaaaaaaaaaaaaaaaaaaaaaaaaaaaaaaaaaaaaaaaaaaaaaaaa

SEQ ID NO: 713 - RNA, 1694 nt, synthetic construct
  misc_feature 1..1694: note Artificial____HsIgE(1-18)_Ec(J96)-FimH(22-300_N28S_N91S_N24 9Q)_Linker-PGDGN_Ec(J96)-FimG(24-37)_Linker-SGG_LumSynth(1- 154_C37A_N102D) mRNA opt1
  source 1..1694: mol_type = other RNA
aggagagtcccgcagtcggcgtccagcggctctgcttgttcgtgtgtgtgtcgttgcaggccttattcaagcttaccatggactggacctggatcctgttcctcgtggccgccgcgacccgcgtccacagcttcgcctgcaagacggcctccggcaccgccatccccatcgggggcgggagcgccaacgtgtacgtgaacctggcgccggtcgtgaacgtgggccagaacctggtcgtggacctctccacccagatcttctgccacaacgactaccccgagaccatcacggactacgtgaccctgcagcgggggagcgcctacggcggcgtcctgtccagcttctccgggaccgtgaagtacagcggctccagctaccccttccccaccacgtccgagaccccgcgcgtggtctacaacagccggaccgacaagccctggcccgtggccctctacctgacccccgtgtccagcgccgggggcgtcgcgatcaaggccgggtccctgatcgccgtgctcatcctgcgccagacgaacaactacaacagcgacgacttccagttcgtgtggaacatctacgccaacaacgacgtcgtggtgccgaccggcggctgcgacgtctccgcccgggacgtgaccgtgaccctgcccgactaccccgggagcgtccccatcccgctcacggtgtactgcgcgaagtcccagaacctgggctactacctgagcgggaccaccgccgacgccggcaacagcatcttcaccaacacggcctccttcagccccgcccagggcgtcggggtgcagctcacccgccagggcaccatcatccccgcgaacaacaccgtgtccctgggggccgtcggcacgagcgccgtgtccctggggctcaccgccaactacgcccggaccggcggccaggtgaccgcggggaacgtccagagcatcatcggcgtgacgttcgtgtaccagcccggggacggcaacgccgacgtcaccatcaccgtgaacgggaaggtggtcgccaagtccggcggcatgcagatctacgaggggaagctgaccgccgagggcctgcgcttcgggatcgtggccagccggttcaaccacgcgctcgtggaccgcctggtcgagggcgccatcgacgccatcgtgcggcacgggggccgcgaggaggacatcacgctggtgcgggtcccgggctcctgggagatccccgtggccgcgggggagctcgcccgcaaggaggacatcgacgccgtgatcgccatcggcgtcctgatccgcggggccacgccccacttcgactacatcgcgagcgaggtgtccaagggcctggccgacctcagcctggagctgcggaagcccatcaccttcggcgtgatcaccgccgacaccctcgagcaggccatcgagcgggccgggaccaagcacggcaacaaggggtgggaggcggccctgtccgccatcgagatggccaacctgttcaagagcctccgctgaggactagtccctgttcccagagcccacttttttttctttttttgaaataaaatagcctgtctttcagatctcaaaggctcttttcagagccaccaaaaaaaaaaaaaaaaaaaaaaaaaaaaaaaaaaaaaaaaaaaaaaaaaaaaaaaaaaaaaaaaaaaaaaaaaaaaaaaaaaaaaaaaaaaaaaaaaaaaa

SEQ ID NO: 714 - RNA, 1694 nt, synthetic construct
  misc_feature 1..1694: note Artificial____HsIgE(1-18)_Ec(J96)-FimH(22-300_N28S_N91S_N24 9Q_N256D)_Linker-PGDGN_Ec(J96)-FimG(24-37)_Linker-SGG_LumSy nth(1-154_C37A_N102D) mRNA opt1
  source 1..1694: mol_type = other RNA
aggagagtcccgcagtcggcgtccagcggctctgcttgttcgtgtgtgtgtcgttgcaggccttattcaagcttaccatggactggacctggatcctgttcctcgtggccgccgcgacccgcgtccacagcttcgcctgcaagacggcctccggcaccgccatccccatcgggggcgggagcgccaacgtgtacgtgaacctggcgccggtcgtgaacgtgggccagaacctggtcgtggacctctccacccagatcttctgccacaacgactaccccgagaccatcacggactacgtgaccctgcagcgggggagcgcctacggcggcgtcctgtccagcttctccgggaccgtgaagtacagcggctccagctaccccttccccaccacgtccgagaccccgcgcgtggtctacaacagccggaccgacaagccctggcccgtggccctctacctgacccccgtgtccagcgccgggggcgtcgcgatcaaggccgggtccctgatcgccgtgctcatcctgcgccagacgaacaactacaacagcgacgacttccagttcgtgtggaacatctacgccaacaacgacgtcgtggtgccgaccggcggctgcgacgtctccgcccgggacgtgaccgtgaccctgcccgactaccccgggagcgtccccatcccgctcacggtgtactgcgcgaagtcccagaacctgggctactacctgagcgggaccaccgccgacgccggcaacagcatcttcaccaacacggcctccttcagccccgcccagggcgtcggggtgcagctcacccgccagggcaccatcatccccgcggacaacaccgtgtccctgggggccgtcggcacgagcgccgtgtccctggggctcaccgccaactacgcccggaccggcggccaggtgaccgcggggaacgtccagagcatcatcggcgtgacgttcgtgtaccagcccggggacggcaacgccgacgtcaccatcaccgtgaacgggaaggtggtcgccaagtccggcggcatgcagatctacgaggggaagctgaccgccgagggcctgcgcttcgggatcgtggccagccggttcaaccacgcgctcgtggaccgcctggtcgagggcgccatcgacgccatcgtgcggcacgggggccgcgaggaggacatcacgctggtgcgggtcccgggctcctgggagatccccgtggccgcgggggagctcgcccgcaaggaggacatcgacgccgtgatcgccatcggcgtcctgatccgcggggccacgccccacttcgactacatcgcgagcgaggtgtccaagggcctggccgacctcagcctggagctgcggaagcccatcaccttcggcgtgatcaccgccgacaccctcgagcaggccatcgagcgggccgggaccaagcacggcaacaaggggtgggaggcggccctgtccgccatcgagatggccaacctgttcaagagcctccgctgaggactagtccctgttcccagagcccacttttttttctttttttgaaataaaatagcctgtctttcagatctcaaaggctcttttcagagccaccaaaaaaaaaaaaaaaaaaaaaaaaaaaaaaaaaaaaaaaaaaaaaaaaaaaaaaaaaaaaaaaaaaaaaaaaaaaaaaaaaaaaaaaaaaaaaaaaaaaaa

SEQ ID NO: 715 - RNA, 1694 nt, synthetic construct
  misc_feature 1..1694: note Artificial____HsIgE(1-18)_Ec(J96)-FimH(22-300_N28S_V48C_L55 C_N91S_N249Q)_Linker-PGDGN_Ec(J96)-FimG(24-37)_Linker-SGG_L umSynth(1-154_C37A_N102D) mRNA opt1
  source 1..1694: mol_type = other RNA
aggagagtcccgcagtcggcgtccagcggctctgcttgttcgtgtgtgtgtcgttgcaggccttattcaagcttaccatggactggacctggatcctgttcctcgtggccgccgcgacccgcgtccacagcttcgcctgcaagacggcctccggcaccgccatccccatcgggggcgggagcgccaacgtgtacgtgaacctggcgccgtgcgtcaacgtgggccagaactgcgtggtcgacctgtccacccagatcttctgccacaacgactaccccgagaccatcacggactacgtgaccctccagcgggggagcgcctacggcggcgtgctgtccagcttctccgggaccgtcaagtacagcggctccagctaccccttccccaccacgtccgagaccccgcgcgtggtgtacaacagccggaccgacaagccctggcccgtcgccctgtacctcacccccgtgtccagcgccgggggcgtggcgatcaaggccgggtccctgatcgccgtcctgatcctccgccagacgaacaactacaacagcgacgacttccagttcgtgtggaacatctacgccaacaacgacgtggtcgtgccgaccggcggctgcgacgtgtccgcccgggacgtcaccgtgaccctgcccgactaccccgggagcgtgcccatcccgctgacggtctactgcgcgaagtcccagaacctcggctactacctgagcgggaccaccgccgacgccggcaacagcatcttcaccaacacggcctccttcagccccgcccagggcgtgggggtccagctgacccgccagggcaccatcatccccgcgaacaacaccgtgtccctcggggccgtgggcacgagcgccgtctccctggggctgaccgccaactacgcccggaccggcggccaggtgaccgcggggaacgtgcagagcatcatcggcgtcacgttcgtgtaccagcccggggacggcaacgccgacgtgaccatcaccgtcaacgggaaggtggtggccaagtccggcggcatgcagatctacgaggggaagctcaccgccgagggcctgcgcttcgggatcgtcgccagccggttcaaccacgcgctggtggaccgcctcgtggagggcgccatcgacgccatcgtccggcacgggggccgcgaggaggacatcacgctggtgcgggtgccgggctcctgggagatccccgtcgccgcgggggagctggcccgcaaggaggacatcgacgccgtgatcgccatcggcgtgctcatccgcggggccacgccccacttcgactacatcgcgagcgaggtctccaagggcctggccgacctgagcctcgagctgcggaagcccatcaccttcggcgtgatcaccgccgacaccctggagcaggccatcgagcgggccgggaccaagcacggcaacaaggggtgggaggcggccctctccgccatcgagatggccaacctgttcaagagcctgcgctgaggactagtccctgttcccagagcccacttttttttctttttttgaaataaaatagcctgtctttcagatctcaaaggctcttttcagagccaccaaaaaaaaaaaaaaaaaaaaaaaaaaaaaaaaaaaaaaaaaaaaaaaaaaaaaaaaaaaaaaaaaaaaaaaaaaaaaaaaaaaaaaaaaaaaaaaaaaaaa

SEQ ID NO: 716 - RNA, 1694 nt, synthetic construct
  misc_feature 1..1694: note Artificial____HsIgE(1-18)_Ec(J96)-FimH(22-300_F165V)_Linker -PGDGN_Ec(J96)-FimG(24-37)_Linker-SGG_LumSynth(1-154_C37A_N 102D) mRNA opt1
  source 1..1694: mol_type = other RNA
aggagagtcccgcagtcggcgtccagcggctctgcttgttcgtgtgtgtgtcgttgcaggccttattcaagcttaccatggactggacctggatcctgttcctcgtggccgccgcgacccgcgtccacagcttcgcctgcaagacggccaacggcaccgccatccccatcgggggcgggtccgccaacgtgtacgtgaacctggcgccggtcgtgaacgtgggccagaacctggtcgtggacctcagcacccagatcttctgccacaacgactaccccgagaccatcacggactacgtgaccctgcagcgggggtccgcctacggcggcgtcctgagcaacttctccgggaccgtgaagtacagcggctccagctaccccttccccaccacgtccgagaccccgcgcgtggtctacaacagccggaccgacaagccctggcccgtggccctctacctgacccccgtgtccagcgccgggggcgtcgcgatcaaggccgggtccctgatcgccgtgctcatcctgcgccagacgaacaactacaacagcgacgacttccaggtggtctggaacatctacgccaacaacgacgtggtggtcccgaccggcggctgcgacgtgtccgcccgggacgtgaccgtcaccctgcccgactaccccgggagcgtgcccatcccgctcacggtctactgcgcgaagtcccagaacctgggctactacctgagcgggaccaccgccgacgccggcaactccatcttcaccaacacggccagcttcagccccgcccagggcgtgggggtgcagctcacccgcaacggcaccatcatccccgcgaacaacaccgtctccctgggggccgtgggcacgagcgccgtgtccctggggctcaccgccaactacgcccggaccggcggccaggtcaccgcggggaacgtgcagagcatcatcggcgtgacgttcgtctaccagcccggggacggcaacgccgacgtgaccatcaccgtgaacgggaaggtcgtggccaagtccggcggcatgcagatctacgaggggaagctgaccgccgagggcctgcgcttcgggatcgtggccagccggttcaaccacgcgctcgtcgaccgcctggtggagggcgccatcgacgccatcgtgcggcacgggggccgcgaggaggacatcacgctggtccgggtgccgggctcctgggagatccccgtggccgcgggggagctcgcccgcaaggaggacatcgacgccgtcatcgccatcggcgtgctgatccgcggggccacgccccacttcgactacatcgcgagcgaggtgtccaagggcctggccgacctcagcctggagctgcggaagcccatcaccttcggcgtcatcaccgccgacaccctcgagcaggccatcgagcgggccgggaccaagcacggcaacaaggggtgggaggcggccctgtccgccatcgagatggccaacctgttcaagagcctccgctgaggactagtccctgttcccagagcccacttttttttctttttttgaaataaaatagcctgtctttcagatctcaaaggctcttttcagagccaccaaaaaaaaaaaaaaaaaaaaaaaaaaaaaaaaaaaaaaaaaaaaaaaaaaaaaaaaaaaaaaaaaaaaaaaaaaaaaaaaaaaaaaaaaaaaaaaaaaaaa

SEQ ID NO: 717 - RNA, 1721 nt, synthetic construct
  misc_feature 1..1721: note Artificial____HsIgE(1-18)_Ec(J96)-FimH(22-300_N28S_N91S_N24 9Q)_Linker-PGDGN_Ec(J96)-FimG(24-37)_Linker-SGG_Ferritin(5- 167_N19Q) mRNA opt1
  source 1..1721: mol_type = other RNA
aggagagtcccgcagtcggcgtccagcggctctgcttgttcgtgtgtgtgtcgttgcaggccttattcaagcttaccatggactggacctggatcctgttcctcgtggccgccgcgacccgcgtccacagcttcgcctgcaagacggcctccggcaccgccatccccatcgggggcgggagcgccaacgtgtacgtgaacctggcgccggtcgtgaacgtgggccagaacctggtcgtggacctctccacccagatcttctgccacaacgactaccccgagaccatcacggactacgtgaccctgcagcgggggagcgcctacggcggcgtcctgtccagcttctccgggaccgtgaagtacagcggctccagctaccccttccccaccacgtccgagaccccgcgcgtggtctacaacagccggaccgacaagccctggcccgtggccctctacctgacccccgtgtccagcgccgggggcgtcgcgatcaaggccgggtccctgatcgccgtgctcatcctgcgccagacgaacaactacaacagcgacgacttccagttcgtgtggaacatctacgccaacaacgacgtcgtggtgccgaccggcggctgcgacgtctccgcccgggacgtgaccgtgaccctgcccgactaccccgggagcgtccccatcccgctcacggtgtactgcgcgaagtcccagaacctgggctactacctgagcgggaccaccgccgacgccggcaacagcatcttcaccaacacggcctccttcagccccgcccagggcgtcggggtgcagctcacccgccagggcaccatcatccccgcgaacaacaccgtgtccctgggggccgtcggcacgagcgccgtgtccctggggctcaccgccaactacgcccggaccggcggccaggtgaccgcggggaacgtccagagcatcatcggcgtgacgttcgtgtaccagcccggggacggcaacgccgacgtcaccatcaccgtgaacgggaaggtggtcgccaagtccggcggcgacatcatcaagctgctgaacgagcaggtcaacaaggagatgcagagctccaacctctacatgagcatgtccagctggtgctacacccactccctggacggggccggcctgttcctcttcgaccacgccgcggaggagtacgagcacgccaagaagctgatcatcttcctgaacgagaacaacgtgccggtgcagctcacgagcatctccgcccccgagcacaagttcgaggggctgacccagatcttccagaaggcctacgagcacgagcagcacatcagcgagtccatcaacaacatcgtggaccacgcgatcaagagcaaggaccacgccaccttcaacttcctgcagtggtacgtggccgagcagcacgaggaggaggtcctcttcaaggacatcctggacaagatcgagctgatcggcaacgagaaccacgggctctacctggccgaccagtacgtgaagggcatcgccaagtcccgcaagagctgaggactagtccctgttcccagagcccacttttttttctttttttgaaataaaatagcctgtctttcagatctcaaaggctcttttcagagccaccaaaaaaaaaaaaaaaaaaaaaaaaaaaaaaaaaaaaaaaaaaaaaaaaaaaaaaaaaaaaaaaaaaaaaaaaaaaaaaaaaaaaaaaaaaaaaaaaaaaaa

SEQ ID NO: 718 - RNA, 1721 nt, synthetic construct
  misc_feature 1..1721: note Artificial____HsIgE(1-18)_Ec(J96)-FimH(22-300_N28S_N91S_N24 9Q_N256D)_Linker-PGDGN_Ec(J96)-FimG(24-37)_Linker-SGG_Ferri tin(5-167_N19Q) mRNA opt1
  source 1..1721: mol_type = other RNA
aggagagtcccgcagtcggcgtccagcggctctgcttgttcgtgtgtgtgtcgttgcaggccttattcaagcttaccatggactggacctggatcctgttcctcgtggccgccgcgacccgcgtccacagcttcgcctgcaagacggcctccggcaccgccatccccatcgggggcgggagcgccaacgtgtacgtgaacctggcgccggtcgtgaacgtgggccagaacctggtcgtggacctctccacccagatcttctgccacaacgactaccccgagaccatcacggactacgtgaccctgcagcgggggagcgcctacggcggcgtcctgtccagcttctccgggaccgtgaagtacagcggctccagctaccccttccccaccacgtccgagaccccgcgcgtggtctacaacagccggaccgacaagccctggcccgtggccctctacctgacccccgtgtccagcgccgggggcgtcgcgatcaaggccgggtccctgatcgccgtgctcatcctgcgccagacgaacaactacaacagcgacgacttccagttcgtgtggaacatctacgccaacaacgacgtcgtggtgccgaccggcggctgcgacgtctccgcccgggacgtgaccgtgaccctgcccgactaccccgggagcgtccccatcccgctcacggtgtactgcgcgaagtcccagaacctgggctactacctgagcgggaccaccgccgacgccggcaacagcatcttcaccaacacggcctccttcagccccgcccagggcgtcggggtgcagctcacccgccagggcaccatcatccccgcggacaacaccgtgtccctgggggccgtcggcacgagcgccgtgtccctggggctcaccgccaactacgcccggaccggcggccaggtgaccgcggggaacgtccagagcatcatcggcgtgacgttcgtgtaccagcccggggacggcaacgccgacgtcaccatcaccgtgaacgggaaggtggtcgccaagtccggcggcgacatcatcaagctgctgaacgagcaggtcaacaaggagatgcagagctccaacctctacatgagcatgtccagctggtgctacacccactccctggacggggccggcctgttcctcttcgaccacgccgcggaggagtacgagcacgccaagaagctgatcatcttcctgaacgagaacaacgtgccggtgcagctcacgagcatctccgcccccgagcacaagttcgaggggctgacccagatcttccagaaggcctacgagcacgagcagcacatcagcgagtccatcaacaacatcgtggaccacgcgatcaagagcaaggaccacgccaccttcaacttcctgcagtggtacgtggccgagcagcacgaggaggaggtcctcttcaaggacatcctggacaagatcgagctgatcggcaacgagaaccacgggctctacctggccgaccagtacgtgaagggcatcgccaagtcccgcaagagctgaggactagtccctgttcccagagcccacttttttttctttttttgaaataaaatagcctgtctttcagatctcaaaggctcttttcagagccaccaaaaaaaaaaaaaaaaaaaaaaaaaaaaaaaaaaaaaaaaaaaaaaaaaaaaaaaaaaaaaaaaaaaaaaaaaaaaaaaaaaaaaaaaaaaaaaaaaaaaa

SEQ ID NO: 719 - RNA, 1721 nt, synthetic construct
  misc_feature 1..1721: note Artificial____HsIgE(1-18)_Ec(J96)-FimH(22-300_N28S_V48C_L55 C_N91S_N249Q)_Linker-PGDGN_Ec(J96)-FimG(24-37)_Linker-SGG_F erritin(5-167_N19Q) mRNA opt1
  source 1..1721: mol_type = other RNA
aggagagtcccgcagtcggcgtccagcggctctgcttgttcgtgtgtgtgtcgttgcaggccttattcaagcttaccatggactggacctggatcctgttcctcgtggccgccgcgacccgcgtccacagcttcgcctgcaagacggcctccggcaccgccatccccatcgggggcgggagcgccaacgtgtacgtgaacctggcgccgtgcgtcaacgtgggccagaactgcgtggtcgacctgtccacccagatcttctgccacaacgactaccccgagaccatcacggactacgtgaccctccagcgggggagcgcctacggcggcgtgctgtccagcttctccgggaccgtcaagtacagcggctccagctaccccttccccaccacgtccgagaccccgcgcgtggtgtacaacagccggaccgacaagccctggcccgtcgccctgtacctcacccccgtgtccagcgccgggggcgtggcgatcaaggccgggtccctgatcgccgtcctgatcctccgccagacgaacaactacaacagcgacgacttccagttcgtgtggaacatctacgccaacaacgacgtggtcgtgccgaccggcggctgcgacgtgtccgcccgggacgtcaccgtgaccctgcccgactaccccgggagcgtgcccatcccgctgacggtctactgcgcgaagtcccagaacctcggctactacctgagcgggaccaccgccgacgccggcaacagcatcttcaccaacacggcctccttcagccccgcccagggcgtgggggtccagctgacccgccagggcaccatcatccccgcgaacaacaccgtgtccctcggggccgtgggcacgagcgccgtctccctggggctgaccgccaactacgcccggaccggcggccaggtgaccgcggggaacgtgcagagcatcatcggcgtcacgttcgtgtaccagcccggggacggcaacgccgacgtgaccatcaccgtcaacgggaaggtggtggccaagtccggcggcgacatcatcaagctcctgaacgagcaggtcaacaaggagatgcagagctccaacctgtacatgagcatgtccagctggtgctacacccactccctcgacggggccggcctgttcctgttcgaccacgccgcggaggagtacgagcacgccaagaagctcatcatcttcctgaacgagaacaacgtgccggtgcagctgacgagcatctccgcccccgagcacaagttcgaggggctcacccagatcttccagaaggcctacgagcacgagcagcacatcagcgagtccatcaacaacatcgtcgaccacgcgatcaagagcaaggaccacgccaccttcaacttcctgcagtggtacgtggccgagcagcacgaggaggaggtgctgttcaaggacatcctcgacaagatcgagctgatcggcaacgagaaccacgggctgtacctcgccgaccagtacgtcaagggcatcgccaagtcccgcaagagctgaggactagtccctgttcccagagcccacttttttttctttttttgaaataaaatagcctgtctttcagatctcaaaggctcttttcagagccaccaaaaaaaaaaaaaaaaaaaaaaaaaaaaaaaaaaaaaaaaaaaaaaaaaaaaaaaaaaaaaaaaaaaaaaaaaaaaaaaaaaaaaaaaaaaaaaaaaaaaa

SEQ ID NO: 720 - RNA, 1721 nt, synthetic construct
  misc_feature 1..1721: note Artificial____HsIgE(1-18)_Ec(J96)-FimH(22-300_F165V)_Linker -PGDGN_Ec(J96)-FimG(24-37)_Linker-SGG_Ferritin(5-167_N19Q) mRNA opt1
  source 1..1721: mol_type = other RNA
aggagagtcccgcagtcggcgtccagcggctctgcttgttcgtgtgtgtgtcgttgcaggccttattcaagcttaccatggactggacctggatcctgttcctcgtggccgccgcgacccgcgtgcacagcttcgcctgcaagacggccaacggcaccgccatccccatcgggggcgggtccgccaacgtgtacgtgaacctggcgccggtcgtgaacgtgggccagaacctggtcgtggacctcagcacccagatcttctgccacaacgactaccccgagaccatcacggactacgtgaccctgcagcgggggtccgcctacggcggcgtcctgagcaacttctccgggaccgtgaagtacagcggctccagctaccccttccccaccacgtccgagaccccgcgcgtggtctacaacagccggaccgacaagccctggcccgtggccctctacctgacccccgtgtccagcgccgggggcgtcgcgatcaaggccgggtccctgatcgccgtgctcatcctgcgccagacgaacaactacaacagcgacgacttccaggtggtctggaacatctacgccaacaacgacgtggtggtcccgaccggcggctgcgacgtgtccgcccgggacgtgaccgtcaccctgcccgactaccccgggagcgtgcccatcccgctcacggtctactgcgcgaagtcccagaacctgggctactacctgagcgggaccaccgccgacgccggcaactccatcttcaccaacacggccagcttcagccccgcccagggcgtgggggtgcagctcacccgcaacggcaccatcatccccgcgaacaacaccgtctccctgggggccgtgggcacgagcgccgtgtccctggggctcaccgccaactacgcccggaccggcggccaggtcaccgcggggaacgtgcagagcatcatcggcgtgacgttcgtctaccagcccggggacggcaacgccgacgtgaccatcaccgtgaacgggaaggtcgtggccaagtccggcggcgacatcatcaagctgctgaacgagcaggtcaacaaggagatgcagagctccaacctctacatgagcatgtccagctggtgctacacccactccctggacggggccggcctgttcctcttcgaccacgccgcggaggagtacgagcacgccaagaagctgatcatcttcctgaacgagaacaacgtgccggtgcagctcacgagcatctccgcccccgagcacaagttcgaggggctgacccagatcttccagaaggcctacgagcacgagcagcacatcagcgagtccatcaacaacatcgtggaccacgcgatcaagagcaaggaccacgccaccttcaacttcctgcagtggtacgtcgccgagcagcacgaggaggaggtcctcttcaaggacatcctggacaagatcgagctgatcggcaacgagaaccacgggctctacctggccgaccagtacgtgaagggcatcgccaagtcccgcaagagctgaggactagtccctgttcccagagcccacttttttttctttttttgaaataaaatagcctgtctttcagatctcaaaggctcttttcagagccaccaaaaaaaaaaaaaaaaaaaaaaaaaaaaaaaaaaaaaaaaaaaaaaaaaaaaaaaaaaaaaaaaaaaaaaaaaaaaaaaaaaaaaaaaaaaaaaaaaaaaa

SEQ ID NO: 721 - RNA, 998 nt, synthetic construct
  misc_feature 1..998: note Artificial____Ec(J96)-FimC(1-36)_Ec(J96)-FimC(37-241) mRNA opt3
  source 1..998: mol_type = other RNA
aggagagtcccgcagtcggcgtccagcggctctgcttgttcgtgtgtgtgtcgttgcaggccttattcaagcttaccatgagcaacaagaatgtgaacgtcagaaaatcccaggagatcaccttctgcctgctcgccggcattcttatgtttatggctatgatggttgcagggagggccgaagcgggagtggctctgggtgccacacgggtaatataccccgcaggccaaaaacaggtgcagttggccgtcactaataacgacgaaaattctacgtatttaatccagtcatgggtggagaacgctgatggggttaaggacggacgcttcattgtgacccctccactgtttgcaatgaagggcaaaaaggagaatacactacgaatcctcgatgccactaacaatcaactgccgcaggaccgtgaaagtcttttctggatgaacgtcaaggctattcccagcatggataaatccaagctgaccgagaatacattgcagctcgccatcatatctagaatcaaactgtactataggcctgcgaagctggcactcccacccgaccaggccgctgagaaattacggtttcgcagatcggccaactcactgacccttattaatcctactccatactatttgacagtgaccgaactgaacgcaggtacgagggtactagagaatgctctcgttccccctatgggggaaagcactgtgaagctgccaagtgatgccggatccaacatcacctaccggacaattaacgactatggcgcgcttactccgaagatgaccggcgtcatggagtgaggactagtccctgttcccagagcccacttttttttctttttttgaaataaaatagcctgtctttcagatctcaaaggctcttttcagagccaccaaaaaaaaaaaaaaaaaaaaaaaaaaaaaaaaaaaaaaaaaaaaaaaaaaaaaaaaaaaaaaaaaaaaaaaaaaaaaaaaaaaaaaaaaaaaaaaaaaaaa

SEQ ID NO: 722 - RNA, 944 nt, synthetic construct
  misc_feature 1..944: note = Artificial____HsIgE(1-18)_Ec(J96)-FimC(37-241) mRNA opt3
  source 1..944: mol_type = other RNA
aggagagtcccgcagtcggcgtccagcggctctgcttgttcgtgtgtgtgtcgttgcaggccttattcaagcttaccatggactggacctggatcctgttcctcgtggccgctgcaacaagagtccacagcggcgttgcccttggggcgactagggtgatttaccccgctggacagaagcaagtacagctggccgtgacgaacaatgatgagaactccacctatttgatacagtcttgggtcgaaaatgcagacggtgtgaaagatggccggtttatcgttacacctccattattcgccatgaaggggaaaaaggagaacactctgcgcattctagacgctaccaataaccagctcccgcaagatcgagaatcactgttttggatgaatgtgaaagcaatccccagtatggacaagagcaaacttacagagaacaccctgcagttggccattatctcccgtataaagctctactatagacctgctaagctggccctgccacccgatcaggcggcagaaaaactcaggttccggcgctctgccaattcgttaactctgatcaaccctacaccatactatcttaccgtcacggagttgaatgctggaactagagtgctggagaacgccctagtaccccctatgggcgaatcaaccgttaagctcccaagcgacgcaggtagtaatattacatacaggactatcaacgattatggggctctgaccccgaaaatgacaggagtgatggagtgaggactagtccctgttcccagagcccacttttttttctttttttgaaataaaatagcctgtctttcagatctcaaaggctcttttcagagccaccaaaaaaaaaaaaaaaaaaaaaaaaaaaaaaaaaaaaaaaaaaaaaaaaaaaaaaaaaaaaaaaaaaaaaaaaaaaaaaaaaaaaaaaaaaaaaaaaaaaaa

SEQ ID NO: 723 - RNA, 1175 nt, synthetic construct
  misc_feature 1..1175: note Artificial____Ec(J96)-FimH(1-21)_Ec(J96)-FimH(22-300) mRNA opt3
  source 1..1175: mol_type = other RNA
aggagagtcccgcagtcggcgtccagcggctctgcttgttcgtgtgtgtgtcgttgcaggccttattcaagcttaccatgaagagagtgatcaccctgttcgccgtcctccttatgggctggagcgttaacgcttggtcctttgcatgcaaaacagccaatgggactgcgattcccataggaggtggctctgctaacgtgtacgtaaatctggcccctgtggtcaacgtggggcagaatttggttgtggacttatcaacgcaaatcttctgtcacaacgattatccagagaccattacagactacgtcactctgcagaggggaagtgcatatggcggtgtgctaagcaatttttccgggaccgtaaagtactctggatcgtcatatccgttccccacaaccagcgaaactcctcgggttgtgtacaacagtcgcacagataaaccatggcccgtcgccctctatctgacccctgtgtcctctgctggcggcgtggcaatcaaggccgggagccttattgctgtcctgatcttgcgacagacgaataactacaattccgacgattttcagttcgtttggaacatatacgccaataacgacgtggtagtgccaactggaggttgcgatgtctcagcgcgtgacgtgaccgttacactccccgattatcctggcagtgtgccaatcccgctgactgtctactgtgcaaaaagccaaaatctggggtattacctctctggaaccacagccgacgctggcaactccatttttaccaacacggcctcattcagccccgcacagggtgtgggggtacagttaactagaaatggaacaatcattcctgctaacaataccgttagtctgggcgccgtgggcacttctgcggtctcccttgggttgacagccaactatgcaaggaccggaggtcaggtgacggctggcaatgtccaaagcatcataggggtgacctttgtttaccagtgaggactagtccctgttcccagagcccacttttttttctttttttgaaataaaatagcctgtctttcagatctcaaaggctcttttcagagccaccaaaaaaaaaaaaaaaaaaaaaaaaaaaaaaaaaaaaaaaaaaaaaaaaaaaaaaaaaaaaaaaaaaaaaaaaaaaaaaaaaaaaaaaaaaaaaaaaaaaaa

SEQ ID NO: 724 - RNA, 1166 nt, synthetic construct
  misc_feature 1..1166: note = Artificial____HsIgE(1-18)_Ec(J96)-FimH(22-300) mRNA opt3
  source 1..1166: mol_type = other RNA
aggagagtcccgcagtcggcgtccagcggctctgcttgttcgtgtgtgtgtcgttgcaggccttattcaagcttaccatggactggacctggatcctgttcctcgtggccgctgcaacaagagtccacagctttgcctgcaagactgcgaacggcacggctattcccatagggggaggttccgccaatgtttacgtgaaccttgcacctgtagtgaatgtcggccagaacctggtggttgatttgtctacccaaatcttctgtcataatgactatccagagacaattactgattacgtgaccttacagagggggtcagcctatggaggcgtcctgagtaactttagcggtacagtgaaatactccgggtcttcgtatccgttccccaccacttcagaaacacctcgggtagtttacaatagccgcaccgacaagccatggcccgtggctctatatctcacgcctgtcagttccgcaggaggcgtggccatcaaagctggctctctgattgccgtgcttatcctgcgacagactaacaattacaacagcgatgactttcagttcgtctggaatatatacgcgaacaatgatgttgtggtaccaaccgggggatgcgacgtgtccgcacgtgatgtcacagtgactttgcccgactatcctggttcagttccaatcccgctcaccgtgtactgtgccaagagtcaaaacctgggctattacctgagcgggacaaccgctgatgccggaaattctatttttacgaacactgcatccttctcacccgctcagggcgtcggtgtgcagctcacaagaaacgggaccatcattcctgccaataacactgttagcttaggagcggtaggcacaagtgccgtgtctctgggccttaccgcaaattatgctaggaccgggggacaggtcacggccggtaacgtgcaatccatcataggcgtcacatttgtgtaccagtgaggactagtccctgttcccagagcccacttttttttctttttttgaaataaaatagcctgtctttcagatctcaaaggctcttttcagagccaccaaaaaaaaaaaaaaaaaaaaaaaaaaaaaaaaaaaaaaaaaaaaaaaaaaaaaaaaaaaaaaaaaaaaaaaaaaaaaaaaaaaaaaaaaaaaaaaaaaaaa

SEQ ID NO: 725 - RNA, 1172 nt, synthetic construct
  misc_feature 1..1172: note = Artificial____MmIgK(1-20)_Ec(J96)-FimH(22-300) mRNA opt3
  source 1..1172: mol_type = other RNA
aggagagtcccgcagtcggcgtccagcggctctgcttgttcgtgtgtgtgtcgttgcaggccttattcaagcttaccatggagaccgacacactgctcctttgggtgctgttgttatgggtccccggcagcactgggttcgcctgcaagacggctaacggaaccgcaatccctattggtggcgggtccgccaatgtttacgtgaacctggcgccagtagtgaatgtcggacagaacctagtggttgatctctctacacaaatattttgtcacaatgactatccggaaactatcaccgattacgtgacactgcagagaggctcagcttatggtggggtccttagtaacttcagcggaaccgtgaaatactccggctcatcgtatccctttcctactacatcagagaccccaagggtagtttacaatagccggacggacaagccctggcctgtggccctgtatttgactccagtcagttccgcaggcggggtggccattaaagctggatctctcatcgcagtgctgattctgcgccagaccaacaattacaacagcgatgacttccagtttgtctggaatatctacgccaacaatgatgttgtggtacccacaggtggctgcgacgtgtccgctcgagatgtcactgtgaccctccctgactatccagggtcagttccgatacccttaacagtgtactgtgccaagagtcaaaacctgggatattaccttagcggcaccacggcggatgcaggtaattctatcttcactaacacagcctccttttctcctgctcagggggtcggagtgcagttgacccgtaacggcactattatcccagccaataacacagtaagcctgggcgcagttgggaccagtgctgtgtctctaggactcacggccaattatgcgagaaccggtggccaggtcacagccgggaacgtgcaatccattatcggagtcactttcgtgtaccagtgaggactagtccctgttcccagagcccacttttttttctttttttgaaataaaatagcctgtctttcagatctcaaaggctcttttcagagccaccaaaaaaaaaaaaaaaaaaaaaaaaaaaaaaaaaaaaaaaaaaaaaaaaaaaaaaaaaaaaaaaaaaaaaaaaaaaaaaaaaaaaaaaaaaaaaaaaaaaaa

SEQ ID NO: 726 - RNA, 1232 nt, synthetic construct
  misc_feature 1..1232: note Artificial____Ec(J96)-FimH(1-21)_Ec(J96)-FimH(22-300)_Linke r-PGDGN_Ec(J96)-FimG(24-37) mRNA opt3
  source 1..1232: mol_type = other RNA
aggagagtcccgcagtcggcgtccagcggctctgcttgttcgtgtgtgtgtcgttgcaggccttattcaagcttaccatgaagagagtgatcaccctgttcgccgtcctccttatgggctggagcgttaacgcttggtcctttgcatgcaaaacagccaatgggactgcgattcccataggaggtggctctgctaacgtgtacgtaaatctggcccctgtggtcaacgtggggcagaatttggttgtggacttatcaacgcaaatcttctgtcacaacgattatccagagaccattacagactacgtcactctgcagaggggaagtgcatatggcggtgtgctaagcaatttttccgggaccgtaaagtactctggatcgtcatatccgttccccacaaccagcgaaactcctcgggttgtgtacaacagtcgcacagataaaccatggcccgtcgccctctatctgacccctgtgtcctctgctggcggcgtggcaatcaaggccgggagccttattgctgtcctgatcttgcgacagacgaataactacaattccgacgattttcagttcgtttggaacatatacgccaataacgacgtggtagtgccaactggaggttgcgatgtctcagcgcgtgacgtgaccgttacactccccgattatcctggcagtgtgccaatcccgctgactgtctactgtgcaaaaagccaaaatctggggtattacctctctggaaccacagccgacgctggcaactccatttttaccaacacggcctcattcagccccgcacagggtgtgggggtacagttaactagaaatggaacaatcattcctgctaacaataccgttagtctgggcgccgtgggcacttctgcggtctcccttgggttgacagccaactatgcaaggaccggaggtcaggtgacggctggcaatgtccaaagcatcataggggtgacctttgtttaccagccaggagatggcaacgccgacgtgacaattactgtaaatggtaaggtcgtggctaagtgaggactagtccctgttcccagagcccacttttttttctttttttgaaataaaatagcctgtctttcagatctcaaaggctcttttcagagccaccaaaaaaaaaaaaaaaaaaaaaaaaaaaaaaaaaaaaaaaaaaaaaaaaaaaaaaaaaaaaaaaaaaaaaaaaaaaaaaaaaaaaaaaaaaaaaaaaaaaaa

SEQ ID NO: 727 - RNA, 1223 nt, synthetic construct
  misc_feature 1..1223: note Artificial____HsIgE(1-18)_Ec(J96)-FimH(22-300)_Linker-PGDGN _Ec(J96)-FimG(24-37) mRNA opt3
  source 1..1223: mol_type = other RNA
aggagagtcccgcagtcggcgtccagcggctctgcttgttcgtgtgtgtgtcgttgcaggccttattcaagcttaccatggactggacctggatcctgttcctcgtggccgctgcaacaagagtccacagctttgcctgcaagactgcgaacggcacggctattcccatagggggaggttccgccaatgtttacgtgaaccttgcacctgtagtgaatgtcggccagaacctggtggttgatttgtctacccaaatcttctgtcataatgactatccagagacaattactgattacgtgaccttacagagggggtcagcctatggaggcgtcctgagtaactttagcggtacagtgaaatactccgggtcttcgtatccgttccccaccacttcagaaacacctcgggtagtttacaatagccgcaccgacaagccatggcccgtggctctatatctcacgcctgtcagttccgcaggaggcgtggccatcaaagctggctctctgattgccgtgcttatcctgcgacagactaacaattacaacagcgatgactttcagttcgtctggaatatatacgcgaacaatgatgttgtggtaccaaccgggggatgcgacgtgtccgcacgtgatgtcacagtgactttgcccgactatcctggttcagttccaatcccgctcaccgtgtactgtgccaagagtcaaaacctgggctattacctgagcgggacaaccgctgatgccggaaattctatttttacgaacactgcatccttctcacccgctcagggcgtcggtgtgcagctcacaagaaacgggaccatcattcctgccaataacactgttagcttaggagcggtaggcacaagtgccgtgtctctgggccttaccgcaaattatgctaggaccgggggacaggtcacggccggtaacgtgcaatccatcataggcgtcacatttgtgtaccagccaggggacggaaatgctgatgttactattaccgtgaacggcaaagtagtcgccaagtgaggactagtccctgttcccagagcccacttttttttctttttttgaaataaaatagcctgtctttcagatctcaaaggctcttttcagagccaccaaaaaaaaaaaaaaaaaaaaaaaaaaaaaaaaaaaaaaaaaaaaaaaaaaaaaaaaaaaaaaaaaaaaaaaaaaaaaaaaaaaaaaaaaaaaaaaaaaaaa

SEQ ID NO: 728 - RNA, 1229 nt, synthetic construct
  misc_feature 1..1229: note Artificial____HsIgE(1-18)_Ec(J96)-FimH(22-300)_Linker-G4SGG _Ec(J96)-FimG(24-37) mRNA opt3
  source 1..1229: mol_type = other RNA
aggagagtcccgcagtcggcgtccagcggctctgcttgttcgtgtgtgtgtcgttgcaggccttattcaagcttaccatggactggacctggatcctgttcctcgtggccgctgcaacaagagtccacagctttgcctgcaagactgcgaacggcacggctattcccatagggggaggttccgccaatgtttacgtgaaccttgcacctgtagtgaatgtcggccagaacctggtggttgatttgtctacccagatcttctgtcataatgactatccagagacaattactgattacgtgaccttacagagggggtcagcctatggaggcgtcctgagtaactttagcggtacagtgaaatactccgggtcttcgtatccgttccccaccacttcagaaacacctcgggtagtttacaatagccgcaccgacaagccatggcccgtggctctatatctcacgcctgtcagttccgcaggaggcgtggccatcaaagctggctctctgattgccgtgcttatcctgcgacagactaacaattacaacagcgatgactttcagttcgtctggaatatatacgcgaacaatgatgttgtggtaccaaccgggggatgcgacgtgtccgcacgtgatgtcacagtgactttgcccgactatcctggttcagttccaatcccgctcaccgtgtactgtgccaagagtcaaaacctgggctattacctgagcgggacaaccgctgatgccggaaattctatttttacgaacactgcatccttctcacccgctcagggcgtcggtgtgcagctcacaagaaacgggaccatcattcctgccaataacactgttagcttaggagcggtaggcacaagtgccgtgtctctgggccttaccgcaaattatgctaggaccgggggacaggtcacggccggtaacgtgcaatccatcataggcgtcacatttgtgtaccaagggggaggcggtagcgggggcgctgacgttactattaccgtgaatggaaaagtagtcgccaagtgaggactagtccctgttcccagagcccacttttttttctttttttgaaataaaatagcctgtctttcagatctcaaaggctcttttcagagccaccaaaaaaaaaaaaaaaaaaaaaaaaaaaaaaaaaaaaaaaaaaaaaaaaaaaaaaaaaaaaaaaaaaaaaaaaaaaaaaaaaaaaaaaaaaaaaaaaaaaaa

SEQ ID NO: 729 - RNA, 1229 nt, synthetic construct
  misc_feature 1..1229: note Artificial____MmIgK(1-20)_Ec(J96)-FimH(22-300)_Linker-PGDGN _Ec(J96)-FimG(24-37) mRNA opt3
  source 1..1229: mol_type = other RNA
aggagagtcccgcagtcggcgtccagcggctctgcttgttcgtgtgtgtgtcgttgcaggccttattcaagcttaccatggagaccgacacactgctcctttgggtgctgttgttatgggtccccggcagcactgggttcgcctgcaagacggctaacggaaccgcaatccctattggtggcgggtccgccaatgtttacgtgaacctggcgccagtagtgaatgtcggacagaacctagtggttgatctctctacacaaatattttgtcacaatgactatccggaaactatcaccgattacgtgacactgcagagaggctcagcttatggtggggtccttagtaacttcagcggaaccgtgaaatactccggctcatcgtatccctttcctactacatcagagaccccaagggtagtttacaatagccggacggacaagccctggcctgtggccctgtatttgactccagtcagttccgcaggcggggtggccattaaagctggatctctcatcgcagtgctgattctgcgccagaccaacaattacaacagcgatgacttccagtttgtctggaatatctacgccaacaatgatgttgtggtacccacaggtggctgcgacgtgtccgctcgagatgtcactgtgaccctccctgactatccagggtcagttccgatacccttaacagtgtactgtgccaagagtcaaaacctgggatattaccttagcggcaccacggcggatgcaggtaattctatcttcactaacacagcctccttttctcctgctcagggggtcggagtgcagttgacccgtaacggcactattatcccagccaataacacagtaagcctgggcgcagttgggaccagtgctgtgtctctaggactcacggccaattatgcgagaaccggtggccaggtcacagccgggaacgtgcaatccattatcggagtcactttcgtgtaccagcccggcgacggtaatgcagatgttaccataacagtgaacgggaaagtagtcgctaagtgaggactagtccctgttcccagagcccacttttttttctttttttgaaataaaatagcctgtctttcagatctcaaaggctcttttcagagccaccaaaaaaaaaaaaaaaaaaaaaaaaaaaaaaaaaaaaaaaaaaaaaaaaaaaaaaaaaaaaaaaaaaaaaaaaaaaaaaaaaaaaaaaaaaaaaaaaaaaaa

SEQ ID NO: 730 - RNA, 1229 nt, synthetic construct
  misc_feature 1..1229: note Artificial____MmIgK(1-20)_Ec(536)-FimH(22-300)_Linker-PGDGN _Ec(J96)-FimG(24-37) mRNA opt3
  source 1..1229: mol_type = other RNA
aggagagtcccgcagtcggcgtccagcggctctgcttgttcgtgtgtgtgtcgttgcaggccttattcaagcttaccatggagaccgacacactgctcctttgggtgctgttgttatgggtccccggcagcactgggttcgcctgcaagacggctaacggaaccgcaatccctattggtggcgggtccgccaatgtttacgtgaacctggcgccagctgtaaatgtgggacagaacctagtcgtggatctctctacacaaatattttgtcacaatgactatccggaaactatcaccgattacgttacactgcagagaggctcagcctatggtggggtgcttagtagcttctccggaaccgtcaaatacaacggctcatcgtatccctttcctactacatcagagaccccaagggtggtatacaatagccggacggacaagccctggcctgttgcactgtatttgactccagtgagttccgccggcggggtcgctattaaagcaggatctctcatcgccgtgctgattctgcgccagaccaacaattacaacagcgatgacttccagtttgtgtggaatatctacgctaacaatgatgtcgttgtgcccacaggtggctgcgacgtatccgcccgagatgtgactgtcaccctccctgactatccagggtcagtgccgatacccttaacagtttactgtgcgaagagtcaaaacctgggatattaccttagcggcaccacggcagatgccggtaattctatcttcactaacacagcttccttttctcctgcccagggggtgggagtccagttgacccgtaacggcactattatcccagcaaataacacagtgagcctgggcgctgtagggaccagtgccgtttctctaggactcacggcgaattatgccagaaccggtggccaggtgacagcagggaacgtccaatccattatcggagtgactttcgtctaccagcccggcgacggtaatgctgatgtgaccataacagttaacgggaaagtggtagccaagtgaggactagtccctgttcccagagcccacttttttttctttttttgaaataaaatagcctgtctttcagatctcaaaggctcttttcagagccaccaaaaaaaaaaaaaaaaaaaaaaaaaaaaaaaaaaaaaaaaaaaaaaaaaaaaaaaaaaaaaaaaaaaaaaaaaaaaaaaaaaaaaaaaaaaaaaaaaaaaa

SEQ ID NO: 731 - RNA, 1253 nt, synthetic construct
  misc_feature 1..1253: note Artificial____HsIgE(1-18)_Ec(J96)-FimH(22-300)_Linker-(G4S) 3_Ec(J96)-FimC(135-148) mRNA opt3
  source 1..1253: mol_type = other RNA
aggagagtcccgcagtcggcgtccagcggctctgcttgttcgtgtgtgtgtcgttgcaggccttattcaagcttaccatggactggacctggatcctgttcctcgtggccgctgcaacaagagtccacagctttgcctgcaagactgcgaacggcacggctattcccatagggggaggttccgccaatgtttacgtgaaccttgcacctgtagtgaatgtcggccagaacctggtggttgatttgtctacccagatcttctgtcataatgactatccagagacaattactgattacgtgaccttacagagggggtcagcctatggaggcgtcctgagtaactttagcggtacagtgaaatactccgggtcttcgtatccgttccccaccacttcagaaacacctcgggtagtttacaatagccgcaccgacaagccatggcccgtggctctatatctcacgcctgtcagttccgcaggaggcgtggccatcaaagctggctctctgattgccgtgcttatcctgcgacagactaacaattacaacagcgatgactttcagttcgtctggaatatatacgcgaacaatgatgttgtggtaccaaccgggggatgcgacgtgtccgcacgtgatgtcacagtgactttgcccgactatcctggttcagttccaatcccgctcaccgtgtactgtgccaagagtcaaaacctgggctattacctgagcgggacaaccgctgatgccggaaattctatttttacgaacactgcatccttctcacccgctcagggcgtcggtgtgcagctcacaagaaacgggaccatcattcctgccaataacactgtatcgttaggagcggttggcacaagtgccgtgtctctgggccttaccgcaaattatgctaggaccgggggacaggtcacggccggtaacgtgcaatccatcataggcgtcacatttgtgtaccaagggggaggcggtagcgggggcggaggcagcgggggaggtggctctactgagaataccttgcagctggctattatctcccggattaaatgaggactagtccctgttcccagagcccacttttttttctttttttgaaataaaatagcctgtctttcagatctcaaaggctcttttcagagccaccaaaaaaaaaaaaaaaaaaaaaaaaaaaaaaaaaaaaaaaaaaaaaaaaaaaaaaaaaaaaaaaaaaaaaaaaaaaaaaaaaaaaaaaaaaaaaaaaaaaaa

SEQ ID NO: 732 - RNA, 1676 nt, synthetic construct
  misc_feature 1..1676: note Artificial____LumSynth(1-154_C37A_N102D)_Linker(GGS)4-GGG_E c(J96)-FimH(22-300)_Linker-PGDGN_Ec(J96)-FimG(24-37) mRNA opt3
  source 1..1676: mol_type = other RNA
aggagagtcccgcagtcggcgtccagcggctctgcttgttcgtgtgtgtgtcgttgcaggccttattcaagcttaccatgcagatctacgagggcaagctgaccgccgaagggctcagattcggaattgtggctagcaggtttaaccacgcacttgtcgaccggctggttgagggtgccatagatgcgatcgtgcgccatggcgggcgagaagaggacattacattggtacgtgtgcccggatcctgggaaatccctgtcgctgccggcgagttagcaagaaaagaggatattgacgccgtgatcgctataggtgttctgatcaggggagcaactccacacttcgattatattgcctctgaagtgtcaaaggggctagctgacctcagtctggagcttcggaaaccgatcacgtttggcgtcattaccgccgatacactggaacaagcgatcgagcgcgcaggcactaagcatgggaataaaggatgggaggccgctttgagcgccatagaaatggcaaacctcttcaagtccctgagaggtggctctgggggatcgggcggttcagggggaagcggcggcgggtttgcttgcaagaccgccaatggaacagcgattcccatcggtggcgggagtgccaacgtgtacgtaaatctggcacctgttgtgaacgtcggacagaatctcgtggtggacttatccacccagattttctgtcacaacgattatccagagactatcacagactacgtcaccctgcagaggggctctgcttatggtggggttcttagcaatttttccggcacggtgaaatactcaggaagtagctatcccttccctactacctctgaaacaccacgggtagtgtacaactcccgcactgataagccctggcctgtcgccttgtacctgaccccagtgtcaagcgctggcggggttgccatcaaagcaggaagtctaattgccgtgctcatactgcgacaaacaaataactataattctgacgattttcagttcgtctggaacatctacgctaataacgacgtggtagttccgaccggtggctgcgacgtgtccgcgagagatgtcacggtgactcttcccgactatcctgggagcgtcccaattcccctgacagtgtactgtgcaaagtcgcagaacttgggatattacctctctggcaccactgccgatgctggtaattccatctttacaaacaccgcctcattcagtcctgcacagggggttggcgtgcaactgacgaggaatggaaccataattccagccaacaatacagtcagcttaggcgctgtagggacttccgccgtgtctctgggactcaccgcaaactatgcgcggacaggtggccaggttactgctgggaatgtgcagagcatcatcggagtcacctttgtgtaccagcccggcgacggtaacgccgatgtaacaattaccgtgaatgggaaagttgtcgcaaagtgaggactagtccctgttcccagagcccacttttttttctttttttgaaataaaatagcctgtctttcagatctcaaaggctcttttcagagccaccaaaaaaaaaaaaaaaaaaaaaaaaaaaaaaaaaaaaaaaaaaaaaaaaaaaaaaaaaaaaaaaaaaaaaaaaaaaaaaaaaaaaaaaaaaaaaaaaaaaaa

SEQ ID NO: 733 - RNA, 1694 nt, synthetic construct
  misc_feature 1..1694: note Artificial____HsIgE(1-18)_Ec(J96)-FimH(22-300)_Linker-PGDGN _Ec(J96)-FimG(24-37)_Linker-SGG_LumSynth(1-154_C37A_N102D) mRNA opt3
  source 1..1694: mol_type = other RNA
aggagagtcccgcagtcggcgtccagcggctctgcttgttcgtgtgtgtgtcgttgcaggccttattcaagcttaccatggactggacctggatcctgttcctcgtggccgctgcaacaagagtccacagctttgcctgcaagactgcgaacggcacggctattcccatagggggaggttccgccaatgtttacgtgaaccttgcacctgtagtgaatgtcggccagaacctggtggttgatttgtctacccaaatcttctgtcataatgactatccagagacaattactgattacgtgaccttacagagggggtcagcctatggaggcgtcctgagtaactttagcggtacagtgaaatactccgggtcttcgtatccgttccccaccacttcagaaacacctcgggtagtttacaatagccgcaccgacaagccatggcccgtggctctatatctcacgcctgtcagttccgcaggaggcgtggccatcaaagctggctctctgattgccgtgcttatcctgcgacagactaacaattacaacagcgatgactttcagttcgtctggaatatatacgcgaacaatgatgttgtggtaccaaccgggggatgcgacgtgtccgcacgtgatgtcacagtgactttgcccgactatcctggttcagttccaatcccgctcaccgtgtactgtgccaagagtcaaaacctgggctattacctgagcgggacaaccgctgatgccggaaattctatttttacgaacactgcatccttctcacccgctcagggcgtcggtgtgcagctcacaagaaacgggaccatcattcctgccaataacactgttagcttaggagcggtaggcacaagtgccgtgtctctgggccttaccgcaaattatgctaggaccgggggacaggtcacggccggtaacgtgcaatccatcataggcgtcacatttgtgtaccagccaggggacggaaatgctgatgttactattaccgtgaacggcaaagtagtcgccaagagcggtgggatgcagatctatgagggcaagttgacagcagaaggactgcggttcggcattgtggcctcgcgctttaatcacgctctagttgacagactcgtggagggggcgatcgacgcaatcgtcaggcatggaggtcgggaagaggatattactctggtgcgcgtacccggctcttgggagatacctgtggccgctggggaacttgcccgaaaagaggacatcgatgcagttattgccatcggagtcctgataagaggcgctaccccacacttcgactacattgcctccgaagtgtcaaagggtttggcagatctcagtctggagttaaggaaacccatcacatttggggtgatcaccgcggacactctggagcaggctattgaacgggccggcacgaagcatggaaacaaaggctgggaggcagccctcagcgctatcgaaatggccaatcttttcaagtccctgcgttgaggactagtccctgttcccagagcccacttttttttctttttttgaaataaaatagcctgtctttcagatctcaaaggctcttttcagagccaccaaaaaaaaaaaaaaaaaaaaaaaaaaaaaaaaaaaaaaaaaaaaaaaaaaaaaaaaaaaaaaaaaaaaaaaaaaaaaaaaaaaaaaaaaaaaaaaaaaaaa

SEQ ID NO: 734 - RNA, 1721 nt, synthetic construct
  misc_feature 1..1721: note Artificial____HsIgE(1-18)_Ec(J96)-FimH(22-300)_Linker-PGDGN _Ec(J96)-FimG(24-37)_Linker-SGG_Ferritin(5-167_N19Q) mRNA opt3
  source 1..1721: mol_type = other RNA
aggagagtcccgcagtcggcgtccagcggctctgcttgttcgtgtgtgtgtcgttgcaggccttattcaagcttaccatggactggacctggatcctgttcctcgtggccgctgcaacaagagtccacagctttgcctgcaagactgcgaacggcacggctattcccatagggggaggttccgccaatgtttacgtgaaccttgcacctgtagtgaatgtcggccagaacctggtggttgatttgtctacccaaatcttctgtcataatgactatccagagacaattactgattacgtgaccttacagagggggtcagcctatggaggcgtcctgagtaactttagcggtacagtgaaatactccgggtcttcgtatccgttccccaccacttcagaaacacctcgggtagtttacaatagccgcaccgacaagccatggcccgtggctctatatctcacgcctgtcagttccgcaggaggcgtggccatcaaagctggctctctgattgccgtgcttatcctgcgacagactaacaattacaacagcgatgactttcagttcgtctggaatatatacgcgaacaatgatgttgtggtaccaaccgggggatgcgacgtgtccgcacgtgatgtcacagtgactttgcccgactatcctggttcagttccaatcccgctcaccgtgtactgtgccaagagtcaaaacctgggctattacctgagcgggacaaccgctgatgccggaaattctatttttacgaacactgcatccttctcacccgctcagggcgtcggtgtgcagctcacaagaaacgggaccatcattcctgccaataacactgtgagcttaggagcggttggcacaagtgccgtgtctctgggccttaccgcaaattatgctaggaccgggggacaggtcacggccggtaacgtgcaatccatcataggcgtcacatttgtgtaccagccaggggacggaaatgctgatgttactattaccgtgaacggcaaagtagtcgccaagagcggtggggacatcattaagttgctgaatgagcaggtaaacaaagaaatgcagtcgtctaatctatatatgtccatgtcaagttggtgctacacacacagcctcgacggcgcaggactgttcctttttgatcatgccgctgaggaatacgagcacgcgaagaaactgatcatcttcttgaacgagaataacgttcccgtgcaactcacttccatttctgcacctgaacataagtttgagggcctgacccagatattccagaaagcctatgaacacgagcaacacatcagcgagtcaattaataacatcgtcgaccatgctataaagagtaaggatcacgccacattcaactttttacagtggtacgtggcagaacagcatgaggaagaggtactgttcaaagacattctcgataagatcgaacttatcgggaatgagaaccacggactgtatttggccgaccagtacgtgaaaggtattgctaagtcccggaaaagctgaggactagtccctgttcccagagcccacttttttttctttttttgaaataaaatagcctgtctttcagatctcaaaggctcttttcagagccaccaaaaaaaaaaaaaaaaaaaaaaaaaaaaaaaaaaaaaaaaaaaaaaaaaaaaaaaaaaaaaaaaaaaaaaaaaaaaaaaaaaaaaaaaaaaaaaaaaaaaa

SEQ ID NO: 735 - RNA, 1751 nt, synthetic construct
  misc_feature 1..1751: note Artificial____MmIgK(1-20)_Ec(J96)-FimH(22-300)_Linker-PGDGN _Ec(J96)-FimG(24-37)_Linker-(GGS)4_Ferritin(5-166) mRNA opt3
  source 1..1751: mol_type = other RNA
aggagagtcccgcagtcggcgtccagcggctctgcttgttcgtgtgtgtgtcgttgcaggccttattcaagcttaccatggagaccgacacactgctcctttgggtgctgttgttatgggtccccggcagcactgggttcgcctgcaagacggctaacggaaccgcaatccctattggtggcgggtccgccaatgtttacgtgaacctggcgccagtagtgaatgtcggacagaacctagtggttgatctctctacacaaatattttgtcacaatgactatccggaaactatcaccgattacgtgacactgcagagaggctcagcttatggtggggtccttagtaacttcagcggaaccgtgaaatactccggctcatcgtatccctttcctactacatcagagaccccaagggtagtttacaatagccggacggacaagccctggcctgtggccctgtatttgactccagtcagttccgcaggcggggtggccattaaagctggatctctcatcgcagtgctgattctgcgccagaccaacaattacaacagcgatgacttccagtttgtctggaatatctacgccaacaatgatgttgtggtacccacaggtggctgcgacgtgtccgctcgagatgtcactgtgaccctccctgactatccagggtcagttccgatacccttaacagtgtactgtgccaagagtcaaaacctgggatattaccttagcggcaccacggcggatgcaggtaattctatcttcactaacacagcctccttttctcctgctcagggggtcggagtgcagttgacccgtaacggcactattatcccagccaataacacagtaagcctgggcgcagttgggaccagtgctgtgtctctaggactcacggccaattatgcgagaaccggtggccaggtcacagccgggaacgtgcaatccattatcggagtcactttcgtgtaccagcccggcgacggtaatgcagatgttaccataacagtgaacgggaaagtagtcgctaagggcggaagcggcgggtcgggaggttctggcgggtccgacattatcaagctgcttaatgaacaggtgaacaaagagatgaactcaagtaatctgtatatgagcatgtcctcttggtgctacactcatagcttggacggagccggcctctttctgttcgatcacgctgccgaagagtacgagcatgcaaagaaattaattatctttctgaatgaaaacaatgttcctgtgcagctcacctcaatcagtgccccagagcacaagttcgaaggtcttacacaaatttttcagaaggcttatgagcatgagcagcacatatccgaaagcatcaacaatattgtcgaccacgcgatcaaatctaaggatcatgcaaccttcaacttcctgcaatggtacgtggccgagcagcacgaagaggaagtattgtttaaagacatactagataagattgagctgatcgggaacgagaatcatggcctctatctggctgaccagtacgtgaaaggaatcgccaagtcaaggaaatgaggactagtccctgttcccagagcccacttttttttctttttttgaaataaaatagcctgtctttcagatctcaaaggctcttttcagagccaccaaaaaaaaaaaaaaaaaaaaaaaaaaaaaaaaaaaaaaaaaaaaaaaaaaaaaaaaaaaaaaaaaaaaaaaaaaaaaaaaaaaaaaaaaaaaaaaaaaaaa

SEQ ID NO: 736 - RNA, 1394 nt, synthetic construct
  misc_feature 1..1394: note Artificial____HsIgE(1-18)_Ec(J96)-FimH(22-300)_Linker-PGDGN _Ec(J96)-FimG(24-37)_TMdomain-HA(510-566) mRNA opt3
  source 1..1394: mol_type = other RNA
aggagagtcccgcagtcggcgtccagcggctctgcttgttcgtgtgtgtgtcgttgcaggccttattcaagcttaccatggactggacctggatcctgttcctcgtggccgctgcaacaagagtccacagctttgcctgcaagactgcgaacggcacggctattcccatagggggaggttccgccaatgtttacgtgaaccttgcacctgtagtgaatgtcggccagaacctggtggttgatttgtctacccaaatcttctgtcataatgactatccagagacaattactgattacgtgaccttacagagggggtcagcctatggaggcgtcctgagtaactttagcggtacagtgaaatactccgggtcttcgtatccgttccccaccacttcagaaacacctcgggtagtttacaatagccgcaccgacaagccatggcccgtggctctatatctcacgcctgtcagttccgcaggaggcgtggccatcaaagctggctctctgattgccgtgcttatcctgcgacagactaacaattacaacagcgatgactttcagttcgtctggaatatatacgcgaacaatgatgttgtggtaccaaccgggggatgcgacgtgtccgcacgtgatgtcacagtgactttgcccgactatcctggttcagttccaatcccgctcaccgtgtactgtgccaagagtcaaaacctgggctattacctgagcgggacaaccgctgatgccggaaattctatttttacgaacactgcatccttctcacccgctcagggcgtcggtgtgcagctcacaagaaacgggaccatcattcctgccaataacactgttagcttaggagcggtaggcacaagtgccgtgtctctgggccttaccgcaaattatgctaggaccgggggacaggtcacggccggtaacgtgcaatccatcataggcgtcacatttgtgtaccagccaggggacggaaatgctgatgttactattaccgtgaacggcaaagtagtcgccaaggcaaagttgaatcgggaggaaatcgacggtgtgaaactggagagcacacgcatttatcagatcctagccatctactcgactgttgcttcttccctcgtgctggtcgtgtcacttggggcgattagtttctggatgtgcagcaacggctccctgcagtgtagaatatgcatctgaggactagtccctgttcccagagcccacttttttttctttttttgaaataaaatagcctgtctttcagatctcaaaggctcttttcagagccaccaaaaaaaaaaaaaaaaaaaaaaaaaaaaaaaaaaaaaaaaaaaaaaaaaaaaaaaaaaaaaaaaaaaaaaaaaaaaaaaaaaaaaaaaaaaaaaaaaaaaa

SEQ ID NO: 737 - RNA, 1727 nt, synthetic construct
  misc_feature 1..1727: note Artificial____HsIgE(1-18)_LumSynth(1-154_C37A_N102D)_Linker (GGS)4-GGG_Ec(J96)-FimH(22-300)_Linker-PGDGN_Ec(J96)-FimG(2 4-37) mRNA opt3
  source 1..1727: mol_type = other RNA
aggagagtcccgcagtcggcgtccagcggctctgcttgttcgtgtgtgtgtcgttgcaggccttattcaagcttaccatggactggacctggatcctgttcctcgtggccgctgcaacaagagtccacagccagatttacgagggcaaacttactgccgaagggctgaggtttggaatagttgcgtcccggttcaaccatgctttggtggatcgcttagtagagggtgccatcgacgcaattgtgcgacacggcgggcgtgaagaggatatcacgctggtcagagtgcccggatcttgggaaattcctgttgccgctggcgagctagcaaggaaggaggacatcgatgccgtgatagctatcggtgtcctcattcgcggggccaccccacattttgactatatcgcgtcagaagtgagtaagggactggcagatcttagcctggagttgcggaaaccgattacattcggcgtaatcactgccgacaccctcgaacaagctatagagagagccggcacaaagcacgggaataaaggatgggaggcagctctgtccgccattgaaatggcgaacctgtttaagtctctcaggggtggctcagggggatcgggcggtagcgggggaagtggcggcgggttcgcctgcaagaccgcaaatggaactgctatccccattggtggcgggtccgccaacgtttacgtgaatttagctcctgtcgtgaacgtgggacagaatctggtcgttgatctttctacacagatcttttgtcataacgactatccagagaccatcacggattacgtgactttgcagcggggcagcgcctatggtggggtactgtccaatttctcaggcaccgtgaaatacagtggaagctcttatccctttcctacaacttccgaaaccccacgcgtcgtgtacaactcacgaacagacaagccctggcctgttgcactatacctcaccccagtgagcagtgccggcggggtcgctattaaagcgggatctctgatagcagtgcttatcctgagacaaacgaataactataattccgatgacttccagtttgtatggaacatttacgccaataacgacgttgtggtcccgactggtggctgcgatgtgagcgctagggacgtcacagtgaccttgcccgattatcctgggtcggttccaatccccctcactgtgtactgtgccaagtctcagaacctgggatattacttatccggcacaaccgcagacgccggtaattcaatattcacgaacaccgctagttttagccctgcccagggggtaggcgtccaactgacacggaatggaactattatcccagcaaacaataccgtgtccctcggcgcggttgggacatctgctgtgagccttggactgactgccaactatgcacgtaccggtggccaggtcacagccgggaatgtgcagtcaatcattggagtaaccttcgtgtaccagcccggcgatggtaacgctgacgttactatcacggtcaatgggaaagtggtggccaagtgaggactagtccctgttcccagagcccacttttttttctttttttgaaataaaatagcctgtctttcagatctcaaaggctcttttcagagccaccaaaaaaaaaaaaaaaaaaaaaaaaaaaaaaaaaaaaaaaaaaaaaaaaaaaaaaaaaaaaaaaaaaaaaaaaaaaaaaaaaaaaaaaaaaaaaaaaaaaaa

SEQ ID NO: 738 - RNA, 1694 nt, synthetic construct
  misc_feature 1..1694: note Artificial____HsIgE(1-18)_Ec(J96)-FimH(22-300_N28S_N91S_N24 9Q)_Linker-PGDGN_Ec(J96)-FimG(24-37)_Linker-SGG_LumSynth(1- 154_C37A_N102D) mRNA opt3
  source 1..1694: mol_type = other RNA
aggagagtcccgcagtcggcgtccagcggctctgcttgttcgtgtgtgtgtcgttgcaggccttattcaagcttaccatggactggacctggatcctgttcctcgtggccgctgcaacaagagtccacagctttgcctgcaagactgcgtccggcacggctattcccatagggggaggttctgccaacgtttacgtgaatcttgcacctgtagtgaacgtcggccagaatctggtggttgatttgtcaacccaaatcttctgtcataacgactatccagagacaattactgattacgtgaccttacagagggggagtgcctatggaggcgtcctgagctccttttctggtacagtgaaatactcggggtcaagctatccgttccccaccacgagtgaaacacctcgggtagtttacaattcccgcaccgacaagccatggcccgtggctctatatctcacgcctgtctctagcgcaggaggcgtggccatcaaagctggctccctgattgccgtgcttatcctgcgacagactaacaattacaactcagatgactttcagttcgtctggaatatatacgcgaacaatgatgttgtggtaccaaccgggggatgcgacgtgagtgcacgtgatgtcacagtgactttgcccgactatcctggtagcgttccaatcccgctcaccgtgtactgtgccaagtctcaaaacctgggctattacctgtccgggacaaccgctgatgccggaaattcaatttttacgaacactgctagcttcagtcccgcacagggcgtcggtgtgcagctcacaagacaggggaccatcattcctgccaataacactgtatctttaggagcggttggcacatccgccgtgagcctgggccttaccgcaaactatgctaggactgggggacaagtcaccgccggtaatgtgcagtcgatcataggcgtcacatttgtgtaccagccaggggacggaaacgctgatgttactattaccgtgaatggcaaagtagtcgccaagtctggtgggatgcagatctatgagggcaagttgacagcagaaggactgcggttcggcattgtggcctcccgctttaaccacgctctagttgacagactcgtggagggggcgatcgacgcaatcgtcaggcatggaggtcgggaagaggatattactctggtgcgcgtacccggctcatgggagatacctgtggccgctggggaacttgcccgaaaagaggacatcgatgcagttattgccatcggagtcctgataagaggcgctaccccacacttcgactacattgccagtgaagtgagcaagggtttggcagatctctccctggagttaaggaaacccatcacatttggggtgatcaccgcggacactctggagcaagctattgaacgggccggcacgaagcatggaaataaaggctgggaggcagccctctctgctatcgaaatggccaaccttttcaagagcctgcgttgaggactagtccctgttcccagagcccacttttttttctttttttgaaataaaatagcctgtctttcagatctcaaaggctcttttcagagccaccaaaaaaaaaaaaaaaaaaaaaaaaaaaaaaaaaaaaaaaaaaaaaaaaaaaaaaaaaaaaaaaaaaaaaaaaaaaaaaaaaaaaaaaaaaaaaaaaaaaaa

SEQ ID NO: 739 - RNA, 1694 nt, synthetic construct
  misc_feature 1..1694: note Artificial____HsIgE(1-18)_Ec(J96)-FimH(22-300_N28S_N91S_N24 9Q_N256D)_Linker-PGDGN_Ec(J96)-FimG(24-37)_Linker-SGG_LumSy nth(1-154_C37A_N102D) mRNA opt3
  source 1..1694: mol_type = other RNA
aggagagtcccgcagtcggcgtccagcggctctgcttgttcgtgtgtgtgtcgttgcaggccttattcaagcttaccatggactggacctggatcctgttcctcgtggccgctgcaacaagagtccacagctttgcctgcaagactgcgtccggcacggctattcccatagggggaggttctgccaacgtttacgtgaatcttgcacctgtagtgaacgtcggccagaatctggtggttgatttgtcaacccaaatcttctgtcataacgactatccagagacaattactgattacgtgaccttacagagggggagtgcctatggaggcgtcctgagctccttttctggtacagtgaaatactcggggtcaagctatccgttccccaccacgagtgaaacacctcgggtagtttacaattcccgcaccgacaagccatggcccgtggctctatatctcacgcctgtctctagcgcaggaggcgtggccatcaaagctggctccctgattgccgtgcttatcctgcgacagactaacaattacaactcagatgactttcagttcgtctggaatatatacgcgaacaatgatgttgtggtaccaaccgggggatgcgacgtgagtgcacgtgatgtcacagtgactttgcccgactatcctggtagcgttccaatcccgctcaccgtgtactgtgccaagtctcaaaacctgggctattacctgtccgggacaaccgctgatgccggaaattcaatttttacgaacactgctagcttcagtcccgcacagggcgtcggtgtgcagctcacaagacaggggaccatcattcctgccgacaatactgtatctttaggagcggttggcacatccgccgtgagcctgggccttaccgcaaactatgctaggactgggggacaagtcaccgccggtaacgtgcagtcgatcataggcgtcacatttgtgtaccagccaggggatggaaatgctgacgttactattaccgtgaacggcaaagtagtcgccaagtctggtgggatgcagatctatgagggcaagttgacagcagaaggactgcggttcggcattgtggcctcccgctttaatcacgctctagttgacagactcgtggagggggcgatcgatgcaatcgtcaggcatggaggtcgggaagaggacattactctggtgcgcgtacccggctcatgggagatacctgtggccgctggggaacttgcccgaaaagaggatatcgacgcagttattgccatcggagtcctgataagaggcgctaccccacacttcgattacattgccagtgaagtgagcaagggtttggcagacctctccctggagttaaggaaacccatcacatttggggtgatcaccgcggatactctggagcaagctattgaacgggccggcacgaagcatggaaacaaaggctgggaggcagccctctctgctatcgaaatggccaatcttttcaagagcctgcgttgaggactagtccctgttcccagagcccacttttttttctttttttgaaataaaatagcctgtctttcagatctcaaaggctcttttcagagccaccaaaaaaaaaaaaaaaaaaaaaaaaaaaaaaaaaaaaaaaaaaaaaaaaaaaaaaaaaaaaaaaaaaaaaaaaaaaaaaaaaaaaaaaaaaaaaaaaaaaaa

SEQ ID NO: 740 - RNA, 1694 nt, synthetic construct
  misc_feature 1..1694: note Artificial____HsIgE(1-18)_Ec(J96)-FimH(22-300_N28S_V48C_L55 C_N91S_N249Q)_Linker-PGDGN_Ec(J96)-FimG(24-37)_Linker-SGG_L umSynth(1-154_C37A_N102D) mRNA opt3
  source 1..1694: mol_type = other RNA
aggagagtcccgcagtcggcgtccagcggctctgcttgttcgtgtgtgtgtcgttgcaggccttattcaagcttaccatggactggacctggatcctgttcctcgtggccgctgcaacaagagtccacagctttgcctgcaagactgcgtccggcacggctattcccatagggggaggttctgccaacgtttacgtgaatcttgcaccttgtgtaaacgtgggccagaattgcgtcgtggatctgtcaacccaaatcttctgtcataacgactatccagagacaattactgattacgttaccttgcagagggggagtgcctatggaggcgtgttaagctccttttctggtacagtcaaatactcggggtcaagctatccgttccccaccacgagtgaaacacctcgggtggtatacaattcccgcaccgacaagccatggcccgttgctctgtatctaacgcctgtgtctagcgcaggaggcgtcgccatcaaagctggctccctcattgccgtgctgatccttcgacagactaacaattacaactcagatgactttcagttcgtgtggaatatatacgcgaacaatgatgtcgttgtgccaaccgggggatgcgacgtaagtgcacgtgatgtgacagtcactctgcccgactatcctggtagcgtgccaatcccgttgaccgtttactgtgccaagtctcaaaacctcggctattacctgtccgggacaaccgctgatgccggaaattcaatttttacgaacactgctagcttcagtcccgcacagggcgtgggtgtccagctgacaagacaggggaccatcattcctgccaataacactgtgtctctcggagcggtaggcacatccgccgttagcttaggcctgaccgcaaactatgctaggactgggggacaagtgaccgccggtaatgtccagtcgatcataggcgtgacatttgtctaccagccaggggacggaaacgctgatgtgactattaccgttaatggcaaagtggtagccaagtctggtgggatgcagatctatgagggcaagctaacagcagaaggattgcggttcggcattgtcgcctcccgctttaaccacgctctggtggacagacttgttgagggggcgatcgacgcaatcgtgaggcatggaggtcgggaagaggatattactctcgtccgcgtgcccggctcatgggagatacctgtagccgctggggaactggcccgaaaagaggacatcgatgcagtgattgccatcggagttcttataagaggcgctaccccacacttcgactacattgccagtgaagtcagcaagggtctggcagatttgtccctcgagctgaggaaacccatcacatttggggtgatcaccgcggacactttagagcaagctattgaacgggccggcacgaagcatggaaataaaggctgggaggcagccctgtctgctatcgaaatggccaacctcttcaagagccttcgttgaggactagtccctgttcccagagcccacttttttttctttttttgaaataaaatagcctgtctttcagatctcaaaggctcttttcagagccaccaaaaaaaaaaaaaaaaaaaaaaaaaaaaaaaaaaaaaaaaaaaaaaaaaaaaaaaaaaaaaaaaaaaaaaaaaaaaaaaaaaaaaaaaaaaaaaaaaaaaa

SEQ ID NO: 741 - RNA, 1694 nt, synthetic construct
  misc_feature 1..1694: note Artificial____HsIgE(1-18)_Ec(J96)-FimH(22-300_F165V)_Linker -PGDGN_Ec(J96)-FimG(24-37)_Linker-SGG_LumSynth(1-154_C37A_N 102D) mRNA opt3
  source 1..1694: mol_type = other RNA
aggagagtcccgcagtcggcgtccagcggctctgcttgttcgtgtgtgtgtcgttgcaggccttattcaagcttaccatggactggacctggatcctgttcctcgtggccgctgcaacaagagtccacagctttgcctgcaagactgcgaacggcacggctattcccatagggggaggttccgccaatgtttacgtgaaccttgcacctgtagtgaatgtcggccagaacctggtggttgatttgtctacccaaatcttctgtcataatgactatccagagacaattactgattacgtgaccttacagagggggtcagcctatggaggcgtcctgagtaactttagcggtacagtgaaatactccgggtcttcgtatccgttccccaccacttcagaaacacctcgggtagtttacaatagccgcaccgacaagccatggcccgtggctctatatctcacgcctgtcagttccgcaggaggcgtggccatcaaagctggctctctgattgccgtgcttatcctgcgacagactaacaattacaacagcgatgactttcaggtcgtttggaatatatacgcgaacaatgatgtggtagtgccaaccgggggatgcgacgtctccgcacgtgatgtgacagttactttgcccgactatcctggttcagtgccaatcccgctcaccgtctactgtgccaagagtcaaaacctgggctattacctgagcgggacaaccgctgatgccggaaattctattttcacgaacactgcatccttttcacccgctcagggcgtgggtgtacagctcacaagaaacgggaccatcattcctgccaataacactgttagcttaggagcggtgggcacaagtgccgtctctctgggccttaccgcaaattatgctaggaccgggggacaggtgacggccggtaacgtccaatccatcataggcgtgacattcgtttaccagccaggggacggaaatgctgatgtgactattaccgtaaacggcaaagtcgtggccaagagcggtgggatgcagatctatgagggcaagttgacagcagaaggactgcggtttggcattgttgcctcgcgcttcaatcacgctctagtggacagactcgtcgagggggcgatcgacgcaatcgtgaggcatggaggtcgggaagaggatattactctggtacgcgtgcccggctcttgggagatacctgttgccgctggggaacttgcccgaaaagaggacatcgatgcagtcattgccatcggagtgctgataagaggcgctaccccacactttgactacattgcctccgaagtgtcaaagggtttggcagatctcagtctggagttaaggaaacccatcacattcggggtcatcaccgcggacactctggagcaggctattgaacgggccggcacgaagcatggaaacaaaggctgggaggcagccctcagcgctatcgaaatggccaatctttttaagtccctgcgttgaggactagtccctgttcccagagcccacttttttttctttttttgaaataaaatagcctgtctttcagatctcaaaggctcttttcagagccaccaaaaaaaaaaaaaaaaaaaaaaaaaaaaaaaaaaaaaaaaaaaaaaaaaaaaaaaaaaaaaaaaaaaaaaaaaaaaaaaaaaaaaaaaaaaaaaaaaaaaa

SEQ ID NO: 742 - RNA, 1721 nt, synthetic construct
  misc_feature 1..1721: note Artificial____HsIgE(1-18)_Ec(J96)-FimH(22-300_N28S_N91S_N24 9Q)_Linker-PGDGN_Ec(J96)-FimG(24-37)_Linker-SGG_Ferritin(5- 167_N19Q) mRNA opt3
  source 1..1721: mol_type = other RNA
aggagagtcccgcagtcggcgtccagcggctctgcttgttcgtgtgtgtgtcgttgcaggccttattcaagcttaccatggactggacctggatcctgttcctcgtggccgctgcaacaagagtccacagctttgcctgcaagactgcgtccggcacggctattcccatagggggaggttctgccaacgtttacgtgaatcttgcacctgtagtgaacgtcggccagaatctggtggttgatttgtcaacccaaatcttctgtcataacgactatccagagacaattactgattacgtgaccttacagagggggagtgcctatggaggcgtcctgagctccttttctggtacagtgaaatactcggggtcaagctatccgttccccaccacgagtgaaacacctcgggtagtttacaattcccgcaccgacaagccatggcccgtggctctatatctcacgcctgtctctagcgcaggaggcgtggccatcaaagctggctccctgattgccgtgcttatcctgcgacagactaacaattacaactcagatgactttcagttcgtctggaatatatacgcgaacaatgatgttgtggtaccaaccgggggatgcgacgtgagtgcacgtgatgtcacagtgactttgcccgactatcctggtagcgttccaatcccgctcaccgtgtactgtgccaagtctcaaaacctgggctattacctgtccgggacaaccgctgatgccggaaattcaatttttacgaacactgctagcttcagtcccgcacagggcgtcggtgtgcagctcacaagacaggggaccatcattcctgccaataacactgtatctttaggagcggttggcacatccgccgtgagcctgggccttaccgcaaactatgctaggactgggggacaagtcaccgccggtaatgtgcagtcgatcataggcgtcacatttgtgtaccagccaggggacggaaacgctgatgttactattaccgtgaatggcaaagtagtcgccaagtctggtggggacatcattaagttgctgaacgaacaggtgaataaagagatgcaatcctcaaacctatatatgagtatgagctcctggtgctacacacactctctcgacggcgcaggactgttcctttttgatcatgccgctgaggaatacgagcacgcgaagaaactgatcatcttcttgaatgagaacaatgttcccgtgcagctcactagcatttcagcacctgaacataagtttgagggcctgacccagatattccaaaaagcctatgaacacgagcagcacatcagtgagtccattaacaatatcgtcgaccatgctataaagagcaaggatcacgccacattcaactttttacagtggtacgtggcagaacagcatgaggaagaggtactgttcaaagacattctcgataagatcgaacttatcgggaatgagaaccacggactgtatttggccgaccaatacgtgaaaggtattgctaagtctcggaaatcatgaggactagtccctgttcccagagcccacttttttttctttttttgaaataaaatagcctgtctttcagatctcaaaggctcttttcagagccaccaaaaaaaaaaaaaaaaaaaaaaaaaaaaaaaaaaaaaaaaaaaaaaaaaaaaaaaaaaaaaaaaaaaaaaaaaaaaaaaaaaaaaaaaaaaaaaaaaaaaa

SEQ ID NO: 743 - RNA, 1721 nt, synthetic construct
  misc_feature 1..1721: note Artificial____HsIgE(1-18)_Ec(J96)-FimH(22-300_N28S_N91S_N24 9Q_N256D)_Linker-PGDGN_Ec(J96)-FimG(24-37)_Linker-SGG_Ferri tin(5-167_N19Q) mRNA opt3
  source 1..1721: mol_type = other RNA
aggagagtcccgcagtcggcgtccagcggctctgcttgttcgtgtgtgtgtcgttgcaggccttattcaagcttaccatggactggacctggatcctgttcctcgtggccgctgcaacaagagtccacagctttgcctgcaagactgcgtccggcacggctattcccatagggggaggttctgccaacgtttacgtgaatcttgcacctgtagtgaacgtcggccagaatctggtggttgatttgtcaacccaaatcttctgtcataacgactatccagagacaattactgattacgtgaccttacagagggggagtgcctatggaggcgtcctgagctccttttctggtacagtgaaatactcggggtcaagctatccgttccccaccacgagtgaaacacctcgggtagtttacaattcccgcaccgacaagccatggcccgtggctctatatctcacgcctgtctctagcgcaggaggcgtggccatcaaagctggctccctgattgccgtgcttatcctgcgacagactaacaattacaactcagatgactttcagttcgtctggaatatatacgcgaacaatgatgttgtggtaccaaccgggggatgcgacgtgagtgcacgtgatgtcacagtgactttgcccgactatcctggtagcgttccaatcccgctcaccgtgtactgtgccaagtctcaaaacctgggctattacctgtccgggacaaccgctgatgccggaaattcaatttttacgaacactgctagcttcagtcccgcacagggcgtcggtgtgcagctcacaagacaggggaccatcattcctgccgacaatactgtatctttaggagcggttggcacatccgccgtgagcctgggccttaccgcaaactatgctaggactgggggacaagtcaccgccggtaacgtgcagtcgatcataggcgtcacatttgtgtaccagccaggggatggaaatgctgacgttactattaccgtgaacggcaaagtagtcgccaagtctggtggggacatcattaagttgctgaatgaacaggtgaacaaagagatgcaatcctcaaatctatatatgagtatgagctcctggtgctacacacactctctcgatggcgcaggactgttcctttttgaccatgccgctgaggaatacgagcacgcgaagaaactgatcatcttcttgaacgagaataacgttcccgtgcagctcactagcatttcagcacctgaacataagtttgagggcctgacccagatattccaaaaagcctatgaacacgagcagcacatcagtgagtccattaataacatcgtcgatcatgctataaagagcaaggaccacgccacattcaactttttacagtggtacgtggcagaacagcatgaggaagaggtactgttcaaagatattctcgacaagatcgaacttatcgggaatgagaatcacggactgtatttggccgatcaatacgtgaaaggtattgctaagtctcggaaatcatgaggactagtccctgttcccagagcccacttttttttctttttttgaaataaaatagcctgtctttcagatctcaaaggctcttttcagagccaccaaaaaaaaaaaaaaaaaaaaaaaaaaaaaaaaaaaaaaaaaaaaaaaaaaaaaaaaaaaaaaaaaaaaaaaaaaaaaaaaaaaaaaaaaaaaaaaaaaaaa

SEQ ID NO: 744 - RNA, 1721 nt, synthetic construct
  misc_feature 1..1721: note Artificial____HsIgE(1-18)_Ec(J96)-FimH(22-300_N28S_V48C_L55 C_N91S_N249Q)_Linker-PGDGN_Ec(J96)-FimG(24-37)_Linker-SGG_F erritin(5-167_N19Q) mRNA opt3
  source 1..1721: mol_type = other RNA
aggagagtcccgcagtcggcgtccagcggctctgcttgttcgtgtgtgtgtcgttgcaggccttattcaagcttaccatggactggacctggatcctgttcctcgtggccgctgcaacaagagtccacagctttgcctgcaagactgcgtccggcacggctattcccatagggggaggttctgccaacgtttacgtgaatcttgcaccttgtgtaaacgtgggccagaattgcgtcgtggatctgtcaacccaaatcttctgtcataacgactatccagagacaattactgattacgttaccttgcagagggggagtgcctatggaggcgtgttaagctccttttctggtacagtcaaatactcggggtcaagctatccgttccccaccacgagtgaaacacctcgggtggtatacaattcccgcaccgacaagccatggcccgttgctctgtatctaacgcctgtgtctagcgcaggaggcgtcgccatcaaagctggctccctcattgccgtgctgatccttcgacagactaacaattacaactcagatgactttcagttcgtgtggaatatatacgcgaacaatgatgtcgttgtgccaaccgggggatgcgacgtaagtgcacgtgatgtgacagtcactctgcccgactatcctggtagcgtgccaatcccgttgaccgtttactgtgccaagtctcaaaacctcggctattacctgtccgggacaaccgctgatgccggaaattcaatttttacgaacactgctagcttcagtcccgcacagggcgtgggtgtccagctgacaagacaggggaccatcattcctgccaataacactgtgtctctcggagcggtaggcacatccgccgttagcttaggcctgaccgcaaactatgctaggactgggggacaagtgaccgccggtaatgtccagtcgatcataggcgtgacatttgtctaccagccaggggacggaaacgctgatgtgactattaccgttaatggcaaagtggtagccaagtctggtggggacatcattaaacttttgaacgagcaggtcaataaggaaatgcaatcctcaaacctgtatatgagtatgagctcctggtgctacacacactctctagacggcgcaggactcttcctgtttgatcatgccgctgaggaatacgagcacgcgaagaaacttatcatcttcctgaatgagaacaatgtgcccgttcagttgactagcatttcagcacctgaacataagtttgagggcctcacccagatattccaaaaagcctatgaacacgagcagcacatcagtgagtccattaacaatatcgtggaccatgctataaagagcaaggatcacgccacattcaactttctgcagtggtacgtcgcagaacagcatgaggaagaggtgttattcaaagacattctggataagatcgaactcatcgggaatgagaaccacggactttatctggccgaccaatacgtaaaaggtattgctaagtctcggaaatcatgaggactagtccctgttcccagagcccacttttttttctttttttgaaataaaatagcctgtctttcagatctcaaaggctcttttcagagccaccaaaaaaaaaaaaaaaaaaaaaaaaaaaaaaaaaaaaaaaaaaaaaaaaaaaaaaaaaaaaaaaaaaaaaaaaaaaaaaaaaaaaaaaaaaaaaaaaaaaaa

SEQ ID NO: 745 - RNA, 1721 nt, synthetic construct
  misc_feature 1..1721: note Artificial____HsIgE(1-18)_Ec(J96)-FimH(22-300_F165V)_Linker -PGDGN_Ec(J96)-FimG(24-37)_Linker-SGG_Ferritin(5-167_N19Q) mRNA opt3
  source 1..1721: mol_type = other RNA
aggagagtcccgcagtcggcgtccagcggctctgcttgttcgtgtgtgtgtcgttgcaggccttattcaagcttaccatggactggacctggatcctgttcctcgtggccgctgcaacaagagtccacagctttgcctgcaagactgcgaacggcacggctattcccatagggggaggttccgccaatgtttacgtgaaccttgcacctgtagtgaatgtcggccagaacctggtggttgatttgtctacccaaatcttctgtcataatgactatccagagacaattactgattacgtgaccttacagagggggtcagcctatggaggcgtcctgagtaactttagcggtacagtgaaatactccgggtcttcgtatccgttccccaccacttcagaaacacctcgggtagtttacaatagccgcaccgacaagccatggcccgtggctctatatctcacgcctgtcagttccgcaggaggcgtggccatcaaagctggctctctgattgccgtgcttatcctgcgacagactaacaattacaacagcgatgactttcaggtcgtttggaatatatacgcgaacaatgatgtggtagtgccaaccgggggatgcgacgtctccgcacgtgatgtgacagttactttgcccgactatcctggttcagtgccaatcccgctcaccgtctactgtgccaagagtcaaaacctgggctattacctgagcgggacaaccgctgatgccggaaattctattttcacgaacactgcatccttttcacccgctcagggcgtgggtgtacagctcacaagaaacgggaccatcattcctgccaataacactgttagcttaggagcggtgggcacaagtgccgtctctctgggccttaccgcaaattatgctaggaccgggggacaggtgacggccggtaacgtccaatccatcataggcgtgacattcgtttaccagccaggggacggaaatgctgatgtgactattaccgtaaacggcaaagtcgtggccaagagcggtggggacatcattaagttgctgaatgagcaggttaacaaagaaatgcagtcgtctaatctatatatgtccatgtcaagttggtgctacacacacagcctcgacggcgcaggactgtttcttttcgatcatgccgctgaggaatacgagcacgcgaagaaactgatcatctttttgaacgagaataacgtgcccgtccaactcacttccatttctgcacctgaacataagttcgagggcctgacccagatatttcagaaagcctatgaacacgagcaacacatcagcgagtcaattaataacatcgtggaccatgctataaagagtaaggatcacgccacattcaatttcttacagtggtacgtagcagaacagcatgaggaagaggtgctgtttaaagacattctcgataagatcgaacttatcgggaacgagaaccacggactgtatttggccgaccagtacgttaaaggtattgctaagtcccggaaaagctgaggactagtccctgttcccagagcccacttttttttctttttttgaaataaaatagcctgtctttcagatctcaaaggctcttttcagagccaccaaaaaaaaaaaaaaaaaaaaaaaaaaaaaaaaaaaaaaaaaaaaaaaaaaaaaaaaaaaaaaaaaaaaaaaaaaaaaaaaaaaaaaaaaaaaaaaaaaaaa

SEQ ID NO: 746 - RNA, 998 nt, synthetic construct
  misc_feature 1..998: note Artificial____Ec(J96)-FimC(1-36)_Ec(J96)-FimC(37-241) mRNA opt3
  source 1..998: mol_type = other RNA
aggagagtcccgcagtcggcgtccagcggctctgcttgttcgtgtgtgtgtcgttgcaggccttattcaagcttaccatgagcaacaagaacgtgaacgtgcggaagtcccaagagatcaccttctgtctgctggccggcatcctgatgtttatggccatgatggtggccggcagagccgaagctggtgttgctcttggagccaccagagtgatctacccagccggccagaaacaggtgcagctggccgtgaccaacaacgacgagaacagcacctacctgatccagagctgggtcgagaatgccgacggcgtgaaggacggcagattcatcgttacccctccactgttcgccatgaagggcaagaaagagaacaccctgcggatcctggacgccaccaacaatcagctgccccaggacagagaaagcctgttctggatgaacgtgaaggctatccccagcatggacaagagcaagctgaccgagaataccctgcagctcgccatcatcagccggatcaagctgtactacagacccgccaaactggccctgcctccagatcaggctgccgagaaactgcggttcagaagaagcgccaacagcctgacactgatcaaccccacaccttactacctgaccgtgaccgagctgaacgccggcacaagagtgctggaaaatgccctggttcctcctatgggcgagagcaccgtgaagctgccatctgatgccggctccaacatcacctaccggaccatcaacgactacggcgccctgacacctaagatgaccggcgtgatggaatgaggactagtccctgttcccagagcccacttttttttctttttttgaaataaaatagcctgtctttcagatctcaaaggctcttttcagagccaccaaaaaaaaaaaaaaaaaaaaaaaaaaaaaaaaaaaaaaaaaaaaaaaaaaaaaaaaaaaaaaaaaaaaaaaaaaaaaaaaaaaaaaaaaaaaaaaaaaaaa

SEQ ID NO: 747 - RNA, 944 nt, synthetic construct
  misc_feature 1..944: note = Artificial____HsIgE(1-18)_Ec(J96)-FimC(37-241) mRNA opt3
  source 1..944: mol_type = other RNA
aggagagtcccgcagtcggcgtccagcggctctgcttgttcgtgtgtgtgtcgttgcaggccttattcaagcttaccatggactggacctggatcctgtttctggtggccgctgccacaagagtgcatagcggagttgctctgggagccaccagagtgatctatcctgccggccagaagcaggttcagctggccgtgaccaacaacgacgagaacagcacctacctgatccagagctgggtcgagaatgccgacggcgtgaaggacggcagattcatcgttacccctccactgttcgccatgaagggcaagaaagagaacaccctgcggatcctggacgccaccaacaatcagctgccccaggacagagaaagcctgttctggatgaacgtgaaggctatccccagcatggacaagagcaagctgaccgagaataccctgcagctggccatcatcagccggatcaagctgtactacagacccgccaaactggccctgcctccagatcaggctgccgagaaactgcggttcagaagaagcgccaacagcctgacactgatcaaccccacaccttactacctgaccgtgaccgagctgaacgccggaaccagagtgctggaaaatgccctggttcctcctatgggcgagagcaccgtgaagctgccatctgatgccggcagcaacatcacctaccggaccatcaacgactacggcgccctgacacctaagatgaccggcgtgatggaatgaggactagtccctgttcccagagcccacttttttttctttttttgaaataaaatagcctgtctttcagatctcaaaggctcttttcagagccaccaaaaaaaaaaaaaaaaaaaaaaaaaaaaaaaaaaaaaaaaaaaaaaaaaaaaaaaaaaaaaaaaaaaaaaaaaaaaaaaaaaaaaaaaaaaaaaaaaaaaa

SEQ ID NO: 748 - RNA, 1175 nt, synthetic construct
  misc_feature 1..1175: note Artificial____Ec(J96)-FimH(1-21)_Ec(J96)-FimH(22-300) mRNA opt3
  source 1..1175: mol_type = other RNA
aggagagtcccgcagtcggcgtccagcggctctgcttgttcgtgtgtgtgtcgttgcaggccttattcaagcttaccatgaagcgcgtgatcaccctgtttgccgtgctgcttatgggctggagcgtgaacgcctggtcctttgcctgcaagaccgccaacggaaccgccattcctatcggcggaggatccgccaatgtgtatgtgaatctggcccctgtggtcaacgtgggccagaacctggtggtggatctgagcacccagatcttttgccacaacgactaccccgagacaatcaccgactacgtgaccctgcagagaggctctgcttacggcggcgtgctgagcaatttttccggcaccgtgaagtacagcggcagcagctacccatttcctaccaccagcgagacacccagagtggtgtacaacagcagaaccgacaagccctggcctgtggctctgtacctgacacctgttagctctgctggcggcgtggccattaaggccggatctctgatcgccgtgctgatcctgagacagaccaacaactacaacagcgacgacttccagttcgtgtggaacatctacgccaacaacgacgtggtggtgcctacaggcggctgtgatgtgtctgccagagatgtgaccgtgacactgcctgactaccctggcagcgtgccaattcctctgaccgtgtactgtgccaagagccagaatctgggctactacctgagcggcacaacagccgatgccggcaacagcatcttcaccaacaccgccagcttcagccctgctcaaggtgttggagtgcagctgacccggaacggcacaatcatccccgccaacaataccgtgtctctgggcgctgttggcaccagcgctgtttctctgggactgaccgccaattacgccagaacaggcggacaagtgaccgccggcaatgtgcagtctatcatcggcgtgaccttcgtgtaccagtgaggactagtccctgttcccagagcccacttttttttctttttttgaaataaaatagcctgtctttcagatctcaaaggctcttttcagagccaccaaaaaaaaaaaaaaaaaaaaaaaaaaaaaaaaaaaaaaaaaaaaaaaaaaaaaaaaaaaaaaaaaaaaaaaaaaaaaaaaaaaaaaaaaaaaaaaaaaaaa

SEQ ID NO: 749 - RNA, 1166 nt, synthetic construct
  misc_feature 1..1166: note = Artificial____HsIgE(1-18)_Ec(J96)-FimH(22-300) mRNA opt3
  source 1..1166: mol_type = other RNA
aggagagtcccgcagtcggcgtccagcggctctgcttgttcgtgtgtgtgtcgttgcaggccttattcaagcttaccatggactggacctggatcctgtttctggtggccgctgccacaagagtgcacagctttgcctgcaagaccgccaacggcaccgccattcctattggcggaggatccgccaatgtgtatgtgaatctggcccctgtggtcaacgtgggccagaacctggtggtggatctgagcacccagatcttttgccacaacgactaccccgagacaatcaccgactacgtgaccctgcagagaggctctgcttacggcggcgtgctgagcaatttttccggcaccgtgaagtacagcggcagcagctacccatttcctaccaccagcgagacacccagagtggtgtacaacagcagaaccgacaagccctggcctgtggctctgtacctgacacctgttagctctgctggcggcgtggccattaaggccggatctctgattgccgtgctgatcctgcggcagaccaacaactacaacagcgacgacttccagttcgtgtggaacatctacgccaacaacgacgtggtggtgcctacaggcggctgtgatgtgtctgccagagatgtgaccgtgacactgcctgactaccctggcagcgtgccaattcctctgaccgtgtactgtgccaagagccagaatctgggctactacctgagcggcacaacagccgatgccggcaacagcatcttcaccaacaccgccagcttcagccctgctcaaggtgttggagtgcagctgacccggaacggcacaatcatccccgccaacaataccgtgtctctgggcgctgttggcaccagcgctgtttctctgggactgaccgccaattacgccagaacaggcggacaagtgaccgccggcaatgtgcagtctatcatcggcgtgaccttcgtgtaccagtgaggactagtccctgttcccagagcccacttttttttctttttttgaaataaaatagcctgtctttcagatctcaaaggctcttttcagagccaccaaaaaaaaaaaaaaaaaaaaaaaaaaaaaaaaaaaaaaaaaaaaaaaaaaaaaaaaaaaaaaaaaaaaaaaaaaaaaaaaaaaaaaaaaaaaaaaaaaaaa

SEQ ID NO: 750 - RNA, 1172 nt, synthetic construct
  misc_feature 1..1172: note = Artificial____MmIgK(1-20)_Ec(J96)-FimH(22-300) mRNA opt3
  source 1..1172: mol_type = other RNA
aggagagtcccgcagtcggcgtccagcggctctgcttgttcgtgtgtgtgtcgttgcaggccttattcaagcttaccatggaaaccgacacactgctgctgtgggtgctgcttctttgggtgcccggctctacaggctttgcctgcaagacagccaacggcaccgccattcctatcggcggaggatccgccaatgtgtatgtgaatctggcccctgtggtcaacgtgggccagaacctggtggtggatctgagcacccagatcttttgccacaacgactaccccgagacaatcaccgactacgtgaccctgcagagaggctctgcttacggcggcgtgctgagcaatttttccggcaccgtgaagtacagcggcagcagctacccatttcctaccaccagcgagacacccagagtggtgtacaacagcagaaccgacaagccctggcctgtggctctgtacctgacacctgttagctctgctggcggcgtggccattaaggccggatctctgattgccgtgctgatcctgcggcagaccaacaactacaacagcgacgacttccagttcgtgtggaacatctacgccaacaacgacgtggtggtgcctacaggcggctgtgatgtgtctgccagagatgtgaccgtgacactgcctgactaccctggcagcgtgccaattcctctgaccgtgtactgtgccaagagccagaatctgggctactacctgagcggcacaacagccgatgccggcaacagcatcttcaccaacaccgccagcttcagccctgctcaaggtgttggagtgcagctgacccggaacggcacaatcatccccgccaacaataccgtgtctctgggcgctgttggcaccagcgctgtttctctgggactgaccgccaactacgccagaacaggcggacaagtgacagccggcaatgtgcagtctatcatcggcgtgaccttcgtgtaccagtgaggactagtccctgttcccagagcccacttttttttctttttttgaaataaaatagcctgtctttcagatctcaaaggctcttttcagagccaccaaaaaaaaaaaaaaaaaaaaaaaaaaaaaaaaaaaaaaaaaaaaaaaaaaaaaaaaaaaaaaaaaaaaaaaaaaaaaaaaaaaaaaaaaaaaaaaaaaaaa

SEQ ID NO: 751 - RNA, 1232 nt, synthetic construct
  misc_feature 1..1232: note Artificial____Ec(J96)-FimH(1-21)_Ec(J96)-FimH(22-300)_Linke r-PGDGN_Ec(J96)-FimG(24-37) mRNA opt3
  source 1..1232: mol_type = other RNA
aggagagtcccgcagtcggcgtccagcggctctgcttgttcgtgtgtgtgtcgttgcaggccttattcaagcttaccatgaagcgcgtgatcaccctgtttgccgtgctgcttatgggctggagcgtgaacgcctggtcctttgcctgcaagaccgccaacggaaccgccattcctatcggcggaggatccgccaatgtgtatgtgaatctggcccctgtggtcaacgtgggccagaacctggtggtggatctgagcacccagatcttttgccacaacgactaccccgagacaatcaccgactacgtgaccctgcagagaggctctgcttacggcggcgtgctgagcaatttttccggcaccgtgaagtacagcggcagcagctacccatttcctaccaccagcgagacacccagagtggtgtacaacagcagaaccgacaagccctggcctgtggctctgtacctgacacctgttagctctgctggcggcgtggccattaaggccggatctctgatcgccgtgctgatcctgagacagaccaacaactacaacagcgacgacttccagttcgtgtggaacatctacgccaacaacgacgtggtggtgcctacaggcggctgtgatgtgtctgccagagatgtgaccgtgacactgcctgactaccctggcagcgtgccaattcctctgaccgtgtactgtgccaagagccagaatctgggctactacctgagcggcacaacagccgatgccggcaacagcatcttcaccaacaccgccagcttcagccctgctcaaggtgttggagtgcagctgacccggaacggcacaatcatccccgccaacaataccgtgtctctgggcgctgttggcaccagcgctgtttctctgggactgaccgccaattacgccagaacaggcggacaagtgaccgccggcaatgtgcagtctatcatcggcgtgaccttcgtgtaccagcctggcgacggaaatgccgacgtgaccatcaccgtgaacggaaaggtggtggccaagtgaggactagtccctgttcccagagcccacttttttttctttttttgaaataaaatagcctgtctttcagatctcaaaggctcttttcagagccaccaaaaaaaaaaaaaaaaaaaaaaaaaaaaaaaaaaaaaaaaaaaaaaaaaaaaaaaaaaaaaaaaaaaaaaaaaaaaaaaaaaaaaaaaaaaaaaaaaaaaa

SEQ ID NO: 752 - RNA, 1223 nt, synthetic construct
  misc_feature 1..1223: note Artificial____HsIgE(1-18)_Ec(J96)-FimH(22-300)_Linker-PGDGN _Ec(J96)-FimG(24-37) mRNA opt3
  source 1..1223: mol_type = other RNA
aggagagtcccgcagtcggcgtccagcggctctgcttgttcgtgtgtgtgtcgttgcaggccttattcaagcttaccatggactggacctggatcctgtttctggtggccgctgccacaagagtgcacagctttgcctgcaagaccgccaacggcaccgccattcctattggcggaggatccgccaatgtgtatgtgaatctggcccctgtggtcaacgtgggccagaacctggtggtggatctgagcacccagatcttttgccacaacgactaccccgagacaatcaccgactacgtgaccctgcagagaggctctgcttacggcggcgtgctgagcaatttttccggcaccgtgaagtacagcggcagcagctacccatttcctaccaccagcgagacacccagagtggtgtacaacagcagaaccgacaagccctggcctgtggctctgtacctgacacctgttagctctgctggcggcgtggccattaaggccggatctctgattgccgtgctgatcctgcggcagaccaacaactacaacagcgacgacttccagttcgtgtggaacatctacgccaacaacgacgtggtggtgcctacaggcggctgtgatgtgtctgccagagatgtgaccgtgacactgcctgactaccctggcagcgtgccaattcctctgaccgtgtactgtgccaagagccagaatctgggctactacctgagcggcacaacagccgatgccggcaacagcatcttcaccaacaccgccagcttcagccctgctcaaggtgttggagtgcagctgacccggaacggcacaatcatccccgccaacaataccgtgtctctgggcgctgttggcaccagcgctgtttctctgggactgaccgccaattacgccagaacaggcggacaagtgaccgccggcaatgtgcagtctatcatcggcgtgaccttcgtgtaccagcctggcgacggaaatgccgacgtgaccatcaccgtgaacggaaaggtggtggccaagtgaggactagtccctgttcccagagcccacttttttttctttttttgaaataaaatagcctgtctttcagatctcaaaggctcttttcagagccaccaaaaaaaaaaaaaaaaaaaaaaaaaaaaaaaaaaaaaaaaaaaaaaaaaaaaaaaaaaaaaaaaaaaaaaaaaaaaaaaaaaaaaaaaaaaaaaaaaaaaa

SEQ ID NO: 753 - RNA, 1229 nt, synthetic construct
  misc_feature 1..1229: note Artificial____HsIgE(1-18)_Ec(J96)-FimH(22-300)_Linker-G4SGG _Ec(J96)-FimG(24-37) mRNA opt3
  source 1..1229: mol_type = other RNA
aggagagtcccgcagtcggcgtccagcggctctgcttgttcgtgtgtgtgtcgttgcaggccttattcaagcttaccatggactggacctggatcctgtttctggtggccgctgccacaagagtgcacagctttgcctgcaagaccgccaacggcaccgccattcctattggcggaggatccgccaatgtgtatgtgaatctggcccctgtggtcaacgtgggccagaacctggtggtggatctgagcacccagatcttttgccacaacgactaccccgagacaatcaccgactacgtgaccctgcagagaggctctgcttacggcggcgtgctgagcaatttttccggcaccgtgaagtacagcggcagcagctacccatttcctaccaccagcgagacacccagagtggtgtacaacagcagaaccgacaagccctggcctgtggctctgtacctgacacctgttagctctgctggcggcgtggccattaaggccggatctctgattgccgtgctgatcctgcggcagaccaacaactacaacagcgacgacttccagttcgtgtggaacatctacgccaacaacgacgtggtggtgcctacaggcggctgtgatgtgtctgccagagatgtgaccgtgacactgcctgactaccctggcagcgtgccaattcctctgaccgtgtactgtgccaagagccagaatctgggctactacctgagcggcacaacagccgatgccggcaacagcatcttcaccaacaccgccagcttcagccctgctcaaggtgttggagtgcagctgacccggaacggcacaatcatccccgccaacaataccgtgtctctgggcgctgttggcaccagcgctgtttctctgggactgaccgccaattacgccagaacaggcggacaagtgaccgccggcaatgtgcagtctatcatcggcgtgaccttcgtgtaccaaggcggaggcggatctggcggagccgatgtgacaatcacagtgaacggaaaggtggtggccaagtgaggactagtccctgttcccagagcccacttttttttctttttttgaaataaaatagcctgtctttcagatctcaaaggctcttttcagagccaccaaaaaaaaaaaaaaaaaaaaaaaaaaaaaaaaaaaaaaaaaaaaaaaaaaaaaaaaaaaaaaaaaaaaaaaaaaaaaaaaaaaaaaaaaaaaaaaaaaaaa

SEQ ID NO: 754 - RNA, 1229 nt, synthetic construct
  misc_feature 1..1229: note Artificial____MmIgK(1-20)_Ec(J96)-FimH(22-300)_Linker-PGDGN _Ec(J96)-FimG(24-37) mRNA opt3
  source 1..1229: mol_type = other RNA
aggagagtcccgcagtcggcgtccagcggctctgcttgttcgtgtgtgtgtcgttgcaggccttattcaagcttaccatggaaaccgacacactgctgctgtgggtgctgcttctttgggtgcccggctctacaggctttgcctgcaagacagccaacggcaccgccattcctatcggcggaggatccgccaatgtgtatgtgaatctggcccctgtggtcaacgtgggccagaacctggtggtggatctgagcacccagatcttttgccacaacgactaccccgagacaatcaccgactacgtgaccctgcagagaggctctgcttacggcggcgtgctgagcaatttttccggcaccgtgaagtacagcggcagcagctacccatttcctaccaccagcgagacacccagagtggtgtacaacagcagaaccgacaagccctggcctgtggctctgtacctgacacctgttagctctgctggcggcgtggccattaaggccggatctctgattgccgtgctgatcctgcggcagaccaacaactacaacagcgacgacttccagttcgtgtggaacatctacgccaacaacgacgtggtggtgcctacaggcggctgtgatgtgtctgccagagatgtgaccgtgacactgcctgactaccctggcagcgtgccaattcctctgaccgtgtactgtgccaagagccagaatctgggctactacctgagcggcacaacagccgatgccggcaacagcatcttcaccaacaccgccagcttcagccctgctcaaggtgttggagtgcagctgacccggaacggcacaatcatccccgccaacaataccgtgtctctgggcgctgttggcaccagcgctgtttctctgggactgaccgccaactacgccagaacaggcggacaagtgacagccggcaatgtgcagtctatcatcggcgtgaccttcgtgtaccagcctggcgacggaaatgccgacgtgaccatcaccgtgaacggaaaggtggtggccaagtgaggactagtccctgttcccagagcccacttttttttctttttttgaaataaaatagcctgtctttcagatctcaaaggctcttttcagagccaccaaaaaaaaaaaaaaaaaaaaaaaaaaaaaaaaaaaaaaaaaaaaaaaaaaaaaaaaaaaaaaaaaaaaaaaaaaaaaaaaaaaaaaaaaaaaaaaaaaaaa

SEQ ID NO: 755 - RNA, 1229 nt, synthetic construct
  misc_feature 1..1229: note Artificial____MmIgK(1-20)_Ec(536)-FimH(22-300)_Linker-PGDGN _Ec(J96)-FimG(24-37) mRNA opt3
  source 1..1229: mol_type = other RNA
aggagagtcccgcagtcggcgtccagcggctctgcttgttcgtgtgtgtgtcgttgcaggccttattcaagcttaccatggaaaccgacacactgctgctgtgggtgctgcttctttgggtgcccggctctacaggctttgcctgcaagacagccaacggcaccgccattcctatcggcggaggatccgccaatgtgtatgtgaatctggcccctgccgtgaacgtgggccagaatctggtggtggatctgagcacccagatcttttgccacaacgactaccccgagacaatcaccgactacgtgaccctgcagagaggctctgcttacggcggagtgctgagcagctttagcggcaccgtgaagtacaacggcagcagctacccatttcctaccaccagcgagacacccagagtggtgtacaacagcagaaccgacaagccctggcctgtggctctgtacctgacacctgttagctctgctggcggcgtggccattaaggccggatctctgattgccgtgctgatcctgcggcagaccaacaactacaacagcgacgacttccagttcgtgtggaacatctacgccaacaacgacgtggtggtgcctacaggcggctgtgatgtgtctgccagagatgtgaccgtgacactgcctgactaccctggcagcgtgccaattcctctgaccgtgtactgtgccaagagccagaacctgggctactacctgtctggcacaacagccgatgccggcaacagcatcttcaccaacacagccagcttcagccccgctcaaggtgttggagtgcagctgaccagaaacggcacaatcatccccgccaacaataccgtgtctctgggcgctgttggcaccagcgctgtttctctgggactgaccgccaactacgccagaacaggcggacaagtgacagccggcaatgtgcagtctatcatcggcgtgaccttcgtgtaccagcctggcgacggaaatgccgacgtgaccatcaccgtgaacggaaaggtggtggccaagtgaggactagtccctgttcccagagcccacttttttttctttttttgaaataaaatagcctgtctttcagatctcaaaggctcttttcagagccaccaaaaaaaaaaaaaaaaaaaaaaaaaaaaaaaaaaaaaaaaaaaaaaaaaaaaaaaaaaaaaaaaaaaaaaaaaaaaaaaaaaaaaaaaaaaaaaaaaaaaa

SEQ ID NO: 756 - RNA, 1253 nt, synthetic construct
  misc_feature 1..1253: note Artificial____HsIgE(1-18)_Ec(J96)-FimH(22-300)_Linker-(G4S) 3_Ec(J96)-FimC(135-148) mRNA opt3
  source 1..1253: mol_type = other RNA
aggagagtcccgcagtcggcgtccagcggctctgcttgttcgtgtgtgtgtcgttgcaggccttattcaagcttaccatggactggacctggatcctgtttctggtggccgctgccacaagagtgcacagctttgcctgcaagaccgccaacggcaccgccattcctattggcggaggatccgccaatgtgtatgtgaatctggcccctgtggtcaacgtgggccagaacctggtggtggatctgagcacccagatcttttgccacaacgactaccccgagacaatcaccgactacgtgaccctgcagagaggctctgcttacggcggcgtgctgagcaatttttccggcaccgtgaagtacagcggcagcagctacccatttcctaccaccagcgagacacccagagtggtgtacaacagcagaaccgacaagccctggcctgtggctctgtacctgacacctgttagctctgctggcggcgtggccattaaggccggatctctgattgccgtgctgatcctgcggcagaccaacaactacaacagcgacgacttccagttcgtgtggaacatctacgccaacaacgacgtggtggtgcctacaggcggctgtgatgtgtctgccagagatgtgaccgtgacactgcctgactaccctggcagcgtgccaattcctctgaccgtgtactgtgccaagagccagaatctgggctactacctgagcggcacaacagccgatgccggcaacagcatcttcaccaacaccgccagcttcagccctgctcaaggtgttggagtgcagctgacccggaacggcacaatcatccccgccaacaataccgtgtctctgggcgctgttggcaccagcgctgtttctctgggactgaccgccaattacgccagaacaggcggacaagtgaccgccggcaatgtgcagtctatcatcggcgtgaccttcgtgtaccaaggcggaggcggatctggtggcggaggcagtggtggcggtggatctacagagaatactctgcagctggccatcatcagccggatcaagtgaggactagtccctgttcccagagcccacttttttttctttttttgaaataaaatagcctgtctttcagatctcaaaggctcttttcagagccaccaaaaaaaaaaaaaaaaaaaaaaaaaaaaaaaaaaaaaaaaaaaaaaaaaaaaaaaaaaaaaaaaaaaaaaaaaaaaaaaaaaaaaaaaaaaaaaaaaaaaa

SEQ ID NO: 757 - RNA, 1676 nt, synthetic construct
  misc_feature 1..1676: note Artificial____LumSynth(1-154_C37A_N102D)_Linker(GGS)4-GGG_E c(J96)-FimH(22-300)_Linker-PGDGN_Ec(J96)-FimG(24-37) mRNA opt3
  source 1..1676: mol_type = other RNA
aggagagtcccgcagtcggcgtccagcggctctgcttgttcgtgtgtgtgtcgttgcaggccttattcaagcttaccatgcagatctacgagggcaagctgaccgccgagggcctgagatttggaatcgtggccagccggttcaatcacgccctggtggatagactggtggaaggcgccatcgatgccattgtcagacacggcggcagagaagaggacatcaccctcgttagagtgcccggctcttgggagattcctgtggctgctggcgagctggcccggaaagaagatatcgacgccgttatcgccatcggcgtgctgatcagaggcgccacacctcacttcgactatatcgccagcgaggtgtccaaaggcctggccgatctgagcctggaactgagaaagcccatcaccttcggcgtgatcaccgctgacacactggaacaggccattgagagagccggcaccaagcacggcaacaaaggatgggaagccgctctgtccgccatcgagatggccaacctgttcaagagcctgagaggcggctctggtggttctggcggatcaggtggaagtggcggaggatttgcctgcaagaccgccaacggaaccgccattcctatcggaggcggaagcgccaatgtgtatgtgaatctggcccctgtggtcaacgtgggccagaacctggtggtggatctgagcacccagatcttttgccacaacgactaccccgagacaatcaccgactacgtgaccctgcagagaggctctgcttacggcggagtgctgagcaatttcagcggcaccgtgaagtacagcggcagcagctacccatttcctaccaccagcgagacacccagagtggtgtacaacagcagaaccgacaagccctggcctgtggctctgtacctgacacctgttagctctgctggcggcgtggcaatcaaagccggatctctgatcgctgtgctgatcctgcggcagaccaacaactacaacagcgacgacttccagttcgtgtggaacatctacgccaacaacgacgtggtggtgcctacaggcggctgtgatgtgtctgccagagatgtgaccgtgacactgcctgactaccctggcagcgtgccaattcctctgaccgtgtactgtgccaagagccagaatctgggctactacctgagcggcacaacagccgatgccggcaacagcatcttcaccaacaccgccagcttcagccctgctcaaggtgttggagtgcagctgacccggaacggcacaatcatccccgccaacaataccgtgtctctgggcgctgttggcaccagcgctgtttctctgggactgaccgccaattacgccagaacaggcggacaagtgacagccggcaatgtgcagagcatcatcggagtgaccttcgtgtaccagcctggcgacggaaatgccgacgtgaccatcaccgtgaacggaaaggtggtggccaagtgaggactagtccctgttcccagagcccacttttttttctttttttgaaataaaatagcctgtctttcagatctcaaaggctcttttcagagccaccaaaaaaaaaaaaaaaaaaaaaaaaaaaaaaaaaaaaaaaaaaaaaaaaaaaaaaaaaaaaaaaaaaaaaaaaaaaaaaaaaaaaaaaaaaaaaaaaaaaaa

SEQ ID NO: 758 - RNA, 1694 nt, synthetic construct
  misc_feature 1..1694: note Artificial____HsIgE(1-18)_Ec(J96)-FimH(22-300)_Linker-PGDGN _Ec(J96)-FimG(24-37)_Linker-SGG_LumSynth(1-154_C37A_N102D) mRNA opt3
  source 1..1694: mol_type = other RNA
aggagagtcccgcagtcggcgtccagcggctctgcttgttcgtgtgtgtgtcgttgcaggccttattcaagcttaccatggactggacctggatcctgtttctggtggccgctgccacaagagtgcacagctttgcctgcaagaccgccaacggcaccgccattcctattggcggaggatccgccaatgtgtatgtgaatctggcccctgtggtcaacgtgggccagaacctggtggtggatctgagcacccagatcttttgccacaacgactaccccgagacaatcaccgactacgtgaccctgcagagaggctctgcttacggcggcgtgctgagcaatttttccggcaccgtgaagtacagcggcagcagctacccatttcctaccaccagcgagacacccagagtggtgtacaacagcagaaccgacaagccctggcctgtggctctgtacctgacacctgttagctctgctggcggcgtggccattaaggccggatctctgattgccgtgctgatcctgcggcagaccaacaactacaacagcgacgacttccagttcgtgtggaacatctacgccaacaacgacgtggtggtgcctacaggcggctgtgatgtgtctgccagagatgtgaccgtgacactgcctgactaccctggcagcgtgccaattcctctgaccgtgtactgtgccaagagccagaatctgggctactacctgagcggcacaacagccgatgccggcaacagcatcttcaccaacaccgccagcttcagccctgctcaaggtgttggagtgcagctgacccggaacggcacaatcatccccgccaacaataccgtgtctctgggcgctgttggcaccagcgctgtttctctgggactgaccgccaattacgccagaacaggcggacaagtgaccgccggcaatgtgcagtctatcatcggcgtgaccttcgtgtaccagcctggcgacggaaatgccgacgtgaccatcaccgtgaacggaaaggtggtggccaagtctggcggcatgcagatctatgagggcaagctgacagccgagggcctgagatttggaatcgtggccagccggttcaatcacgccctggtggatagactggtggaaggcgccatcgatgccattgtcagacacggcggcagagaagaggacatcaccctcgttagagtgcccggctcttgggagattcctgtggctgctggcgaactggcccggaaagaggatatcgacgccgttatcgccatcggagtgctgatcagaggcgccacacctcacttcgactatatcgccagcgaggtgtccaaaggcctggccgatctgagcctggaactgagaaagcccatcaccttcggcgtgatcaccgctgacacactggaacaggccattgagagagccggcaccaagcacggaaacaaaggatgggaagccgctctgtccgccatcgagatggccaacctgttcaagagcctgcggtgaggactagtccctgttcccagagcccacttttttttctttttttgaaataaaatagcctgtctttcagatctcaaaggctcttttcagagccaccaaaaaaaaaaaaaaaaaaaaaaaaaaaaaaaaaaaaaaaaaaaaaaaaaaaaaaaaaaaaaaaaaaaaaaaaaaaaaaaaaaaaaaaaaaaaaaaaaaaaa

SEQ ID NO: 759 - RNA, 1721 nt, synthetic construct
  misc_feature 1..1721: note Artificial____HsIgE(1-18)_Ec(J96)-FimH(22-300)_Linker-PGDGN _Ec(J96)-FimG(24-37)_Linker-SGG_Ferritin(5-167_N19Q) mRNA opt3
  source 1..1721: mol_type = other RNA
aggagagtcccgcagtcggcgtccagcggctctgcttgttcgtgtgtgtgtcgttgcaggccttattcaagcttaccatggactggacctggatcctgtttctggtggccgctgccacaagagtgcacagctttgcctgcaagaccgccaacggcaccgccattcctattggcggaggatccgccaatgtgtatgtgaatctggcccctgtggtcaacgtgggccagaacctggtggtggatctgagcacccagatcttttgccacaacgactaccccgagacaatcaccgactacgtgaccctgcagagaggctctgcttacggcggcgtgctgagcaatttttccggcaccgtgaagtacagcggcagcagctacccatttcctaccaccagcgagacacccagagtggtgtacaacagcagaaccgacaagccctggcctgtggctctgtacctgacacctgttagctctgctggcggcgtggccattaaggccggatctctgattgccgtgctgatcctgcggcagaccaacaactacaacagcgacgacttccagttcgtgtggaacatctacgccaacaacgacgtggtggtgcctacaggcggctgtgatgtgtctgccagagatgtgaccgtgacactgcctgactaccctggcagcgtgccaattcctctgaccgtgtactgtgccaagagccagaatctgggctactacctgagcggcacaacagccgatgccggcaacagcatcttcaccaacaccgccagcttcagccctgctcaaggtgttggagtgcagctgacccggaacggcacaatcatccccgccaacaataccgtgtctctgggcgctgttggcaccagcgctgtttctctgggactgaccgccaattacgccagaacaggcggacaagtgaccgccggcaatgtgcagtctatcatcggcgtgaccttcgtgtaccagcctggcgacggaaatgccgacgtgaccatcaccgtgaacggaaaggtggtggccaagtctggcggcgacatcatcaagctgctgaacgagcaagtgaacaaagagatgcagagcagcaacctgtacatgagcatgagcagctggtgctacacccacagccttgatggcgccggactgttcctgtttgaccatgccgccgaggaatacgagcacgccaagaagctgatcatcttcctgaacgagaacaacgtgcccgtccagctgaccagcatttctgcccctgagcacaagttcgagggcctgacacagatcttccagaaggcctacgaacacgagcagcacatcagcgagagcatcaacaacatcgtggaccacgccattaagagcaaggatcacgccaccttcaactttctgcagtggtacgtggccgaacagcacgaggaagaggtgctgttcaaggacatcctggacaagatcgagctgatcggcaacgagaaccacggcctgtatctggccgaccagtacgtgaagggaatcgccaagtccagaaagagctgaggactagtccctgttcccagagcccacttttttttctttttttgaaataaaatagcctgtctttcagatctcaaaggctcttttcagagccaccaaaaaaaaaaaaaaaaaaaaaaaaaaaaaaaaaaaaaaaaaaaaaaaaaaaaaaaaaaaaaaaaaaaaaaaaaaaaaaaaaaaaaaaaaaaaaaaaaaaaa

SEQ ID NO: 760 - RNA, 1751 nt, synthetic construct
  misc_feature 1..1751: note Artificial____MmIgK(1-20)_Ec(J96)-FimH(22-300)_Linker-PGDGN _Ec(J96)-FimG(24-37)_Linker-(GGS)4_Ferritin(5-166) mRNA opt3
  source 1..1751: mol_type = other RNA
aggagagtcccgcagtcggcgtccagcggctctgcttgttcgtgtgtgtgtcgttgcaggccttattcaagcttaccatggaaaccgacacactgctgctgtgggtgctgcttctttgggtgcccggctctacaggctttgcctgcaagacagccaacggcaccgccattcctatcggcggaggatccgccaatgtgtatgtgaatctggcccctgtggtcaacgtgggccagaacctggtggtggatctgagcacccagatcttttgccacaacgactaccccgagacaatcaccgactacgtgaccctgcagagaggctctgcttacggcggcgtgctgagcaatttttccggcaccgtgaagtacagcggcagcagctacccatttcctaccaccagcgagacacccagagtggtgtacaacagcagaaccgacaagccctggcctgtggctctgtacctgacacctgttagctctgctggcggcgtggccattaaggccggatctctgattgccgtgctgatcctgcggcagaccaacaactacaacagcgacgacttccagttcgtgtggaacatctacgccaacaacgacgtggtggtgcctacaggcggctgtgatgtgtctgccagagatgtgaccgtgacactgcctgactaccctggcagcgtgccaattcctctgaccgtgtactgtgccaagagccagaatctgggctactacctgagcggcacaacagccgatgccggcaacagcatcttcaccaacaccgccagcttcagccctgctcaaggtgttggagtgcagctgacccggaacggcacaatcatccccgccaacaataccgtgtctctgggcgctgttggcaccagcgctgtttctctgggactgaccgccaactacgccagaacaggcggacaagtgacagccggcaatgtgcagtctatcatcggcgtgaccttcgtgtaccagcctggcgacggaaatgccgacgtgaccatcaccgtgaacggaaaggtggtggccaaaggcggttctggtggttctggcggaagtggcggcagcgacatcatcaagctgctgaacgagcaagtgaacaaagagatgaacagcagcaacctgtacatgagcatgagcagctggtgctacacacacagcctggatggcgccggactgttcctgtttgatcatgccgccgaggaatacgagcacgccaagaagctgatcatcttcctgaacgagaacaacgtgcccgtccagctgaccagcatttctgcccctgagcacaagttcgagggcctgacacagatcttccagaaggcctacgaacacgagcagcacatcagcgagagcatcaacaacatcgtggaccacgccatcaagagcaaggatcacgccaccttcaactttctgcagtggtacgtggccgaacagcacgaggaagaggtgctgttcaaggacatcctggacaagatcgagctgatcggcaacgagaaccacggcctgtatctggccgaccagtacgtgaagggaatcgccaagtccagaaagtgaggactagtccctgttcccagagcccacttttttttctttttttgaaataaaatagcctgtctttcagatctcaaaggctcttttcagagccaccaaaaaaaaaaaaaaaaaaaaaaaaaaaaaaaaaaaaaaaaaaaaaaaaaaaaaaaaaaaaaaaaaaaaaaaaaaaaaaaaaaaaaaaaaaaaaaaaaaaaa

SEQ ID NO: 761 - RNA, 1394 nt, synthetic construct
  misc_feature 1..1394: note Artificial____HsIgE(1-18)_Ec(J96)-FimH(22-300)_Linker-PGDGN _Ec(J96)-FimG(24-37)_TMdomain-HA(510-566) mRNA opt3
  source 1..1394: mol_type = other RNA
aggagagtcccgcagtcggcgtccagcggctctgcttgttcgtgtgtgtgtcgttgcaggccttattcaagcttaccatggactggacctggatcctgtttctggtggccgctgccacaagagtgcacagctttgcctgcaagaccgccaacggcaccgccattcctattggcggaggatccgccaatgtgtatgtgaatctggcccctgtggtcaacgtgggccagaacctggtggtggatctgagcacccagatcttttgccacaacgactaccccgagacaatcaccgactacgtgaccctgcagagaggctctgcttacggcggcgtgctgagcaatttttccggcaccgtgaagtacagcggcagcagctacccatttcctaccaccagcgagacacccagagtggtgtacaacagcagaaccgacaagccctggcctgtggctctgtacctgacacctgttagctctgctggcggcgtggccattaaggccggatctctgattgccgtgctgatcctgcggcagaccaacaactacaacagcgacgacttccagttcgtgtggaacatctacgccaacaacgacgtggtggtgcctacaggcggctgtgatgtgtctgccagagatgtgaccgtgacactgcctgactaccctggcagcgtgccaattcctctgaccgtgtactgtgccaagagccagaatctgggctactacctgagcggcacaacagccgatgccggcaacagcatcttcaccaacaccgccagcttcagccctgctcaaggtgttggagtgcagctgacccggaacggcacaatcatccccgccaacaataccgtgtctctgggcgctgttggcaccagcgctgtttctctgggactgaccgccaattacgccagaacaggcggacaagtgaccgccggcaatgtgcagtctatcatcggcgtgaccttcgtgtaccagcctggcgacggaaatgccgacgtgaccatcaccgtgaacggaaaggtggtggccaaggccaagctgaaccgggaagagatcgatggcgtgaagctggaaagcacccggatctaccagatcctggccatctacagcacagtggcctctagcctggtgctggtggtgtccctgggagccatcagcttttggatgtgcagcaacggcagcctgcagtgccggatctgtatctgaggactagtccctgttcccagagcccacttttttttctttttttgaaataaaatagcctgtctttcagatctcaaaggctcttttcagagccaccaaaaaaaaaaaaaaaaaaaaaaaaaaaaaaaaaaaaaaaaaaaaaaaaaaaaaaaaaaaaaaaaaaaaaaaaaaaaaaaaaaaaaaaaaaaaaaaaaaaaa

SEQ ID NO: 762 - RNA, 1727 nt, synthetic construct
  misc_feature 1..1727: note Artificial____HsIgE(1-18)_LumSynth(1-154_C37A_N102D)_Linker (GGS)4-GGG_Ec(J96)-FimH(22-300)_Linker-PGDGN_Ec(J96)-FimG(2 4-37) mRNA opt3
  source 1..1727: mol_type = other RNA
aggagagtcccgcagtcggcgtccagcggctctgcttgttcgtgtgtgtgtcgttgcaggccttattcaagcttaccatggactggacctggatcctgtttctggtggccgctgccacaagagtgcacagccagatctatgagggcaagctgaccgccgagggcctgagatttggaatcgtggccagccggttcaatcacgccctggtggatagactggtggaaggcgccatcgatgccattgtcagacacggcggcagagaagaggacatcaccctcgttagagtgcccggctcttgggagattcctgtggctgctggcgagctggcccggaaagaagatatcgacgccgttatcgccatcggcgtgctgatcagaggcgccacacctcacttcgactatatcgccagcgaggtgtccaaaggcctggccgatctgagcctggaactgagaaagcccatcaccttcggcgtgatcaccgctgacacactggaacaggccattgagagagccggcaccaagcacggcaacaaaggatgggaagccgctctgtccgccatcgagatggccaacctgttcaagagcctgagaggcggctctggtggttctggcggatcaggtggaagtggcggaggatttgcctgcaagaccgccaacggaaccgccattcctatcggaggcggaagcgccaatgtgtatgtgaatctggcccctgtggtcaacgtgggccagaacctggtggtggatctgagcacccagatcttttgccacaacgactaccccgagacaatcaccgactacgtgaccctgcagagaggctctgcttacggcggagtgctgagcaatttcagcggcaccgtgaagtacagcggcagcagctacccatttcctaccaccagcgagacacccagagtggtgtacaacagcagaaccgacaagccctggcctgtggctctgtacctgacacctgttagctctgctggcggcgtggcaatcaaagccggatctctgatcgctgtgctgatcctgcggcagaccaacaactacaacagcgacgacttccagttcgtgtggaacatctacgccaacaacgacgtggtggtgcctacaggcggctgtgatgtgtctgccagagatgtgaccgtgacactgcctgactaccctggcagcgtgccaattcctctgaccgtgtactgtgccaagagccagaatctgggctactacctgagcggcacaacagccgatgccggcaacagcatcttcaccaacaccgccagcttcagccctgctcaaggtgttggagtgcagctgacccggaacggcacaatcatccccgccaacaataccgtgtctctgggcgctgttggcaccagcgctgtttctctgggactgaccgccaattacgccagaacaggcggacaagtgacagccggcaatgtgcagagcatcatcggagtgaccttcgtgtaccagcctggcgacggaaatgccgacgtgaccatcaccgtgaacggaaaggtggtggccaagtgaggactagtccctgttcccagagcccacttttttttctttttttgaaataaaatagcctgtctttcagatctcaaaggctcttttcagagccaccaaaaaaaaaaaaaaaaaaaaaaaaaaaaaaaaaaaaaaaaaaaaaaaaaaaaaaaaaaaaaaaaaaaaaaaaaaaaaaaaaaaaaaaaaaaaaaaaaaaaa

SEQ ID NO: 763 - RNA, 1694 nt, synthetic construct
  misc_feature 1..1694: note Artificial____HsIgE(1-18)_Ec(J96)-FimH(22-300_N28S_N91S_N24 9Q)_Linker-PGDGN_Ec(J96)-FimG(24-37)_Linker-SGG_LumSynth(1- 154_C37A_N102D) mRNA opt3
  source 1..1694: mol_type = other RNA
aggagagtcccgcagtcggcgtccagcggctctgcttgttcgtgtgtgtgtcgttgcaggccttattcaagcttaccatggactggacctggatcctgtttctggtggccgctgccacaagagtgcacagctttgcctgtaaaaccgccagcggcaccgccattcctatcggcggaggatctgccaatgtgtatgtgaatctggcccctgtggtcaacgtgggccagaacctggtggtggatctgagcacccagatcttttgccacaacgactaccccgagacaatcaccgactacgtgaccctgcagagaggctctgcttacggcggagtgctgagcagcttttccggcaccgtgaagtacagcggcagcagctacccatttcctaccaccagcgagacacccagagtggtgtacaacagcagaaccgacaagccctggcctgtggctctgtacctgacacctgttagctctgctggcggcgtggccattaaggccggatctctgattgccgtgctgatcctgcggcagaccaacaactacaacagcgacgacttccagttcgtgtggaacatctacgccaacaacgacgtggtggtgcctacaggcggctgtgatgtgtctgccagagatgtgaccgtgacactgcctgactaccctggcagcgtgccaattcctctgaccgtgtactgtgccaagagccagaatctgggctactacctgagcggcacaacagccgatgccggcaacagcatcttcaccaacaccgccagcttcagccctgctcaaggtgttggagtgcagctgaccagacagggcacaatcatccccgccaacaataccgtgtctctgggcgctgttggcaccagcgctgtttctctgggactgaccgccaactacgccagaacaggcggacaagtgacagccggcaatgtgcagtctatcatcggcgtgaccttcgtgtaccagcctggcgacggaaatgccgacgtgaccatcaccgtgaacggaaaggtggtggccaagtctggcggcatgcagatctatgagggcaagctgaccgccgagggcctgagatttggaatcgtggccagccggttcaatcacgccctggtggatagactggtggaaggcgccatcgatgccattgtcagacacggcggcagagaagaggacatcaccctcgttagagtgcccggctcttgggagattcctgtggctgctggcgaactggcccggaaagaggatatcgacgccgttatcgccatcggggtgctgatcagaggcgccacacctcacttcgactatatcgccagcgaggtgtccaaaggcctggccgatctgagcctggaactgagaaagcccatcaccttcggcgtgatcaccgctgacacactggaacaggccattgagagagccggcaccaagcacggaaacaaaggatgggaagccgctctgtccgccatcgagatggccaacctgttcaagagcctgcggtgaggactagtccctgttcccagagcccacttttttttctttttttgaaataaaatagcctgtctttcagatctcaaaggctcttttcagagccaccaaaaaaaaaaaaaaaaaaaaaaaaaaaaaaaaaaaaaaaaaaaaaaaaaaaaaaaaaaaaaaaaaaaaaaaaaaaaaaaaaaaaaaaaaaaaaaaaaaaaa

SEQ ID NO: 764 - RNA, 1694 nt, synthetic construct
  misc_feature 1..1694: note Artificial____HsIgE(1-18)_Ec(J96)-FimH(22-300_N28S_N91S_N24 9Q_N256D)_Linker-PGDGN_Ec(J96)-FimG(24-37)_Linker-SGG_LumSy nth(1-154_C37A_N102D) mRNA opt3
  source 1..1694: mol_type = other RNA
aggagagtcccgcagtcggcgtccagcggctctgcttgttcgtgtgtgtgtcgttgcaggccttattcaagcttaccatggactggacctggatcctgtttctggtggccgctgccacaagagtgcacagctttgcctgtaaaaccgccagcggcaccgccattcctatcggcggaggatctgccaatgtgtatgtgaatctggcccctgtggtcaacgtgggccagaacctggtggtggatctgagcacccagatcttttgccacaacgactaccccgagacaatcaccgactacgtgaccctgcagagaggctctgcttacggcggagtgctgagcagcttttccggcaccgtgaagtacagcggcagcagctacccatttcctaccaccagcgagacacccagagtggtgtacaacagcagaaccgacaagccctggcctgtggctctgtacctgacacctgttagctctgctggcggcgtggccattaaggccggatctctgattgccgtgctgatcctgcggcagaccaacaactacaacagcgacgacttccagttcgtgtggaacatctacgccaacaacgacgtggtggtgcctacaggcggctgtgatgtgtctgccagagatgtgaccgtgacactgcctgactaccctggcagcgtgccaattcctctgaccgtgtactgtgccaagagccagaatctgggctactacctgagcggcacaacagccgatgccggcaacagcatcttcaccaacaccgccagcttcagccctgctcaaggtgttggagtgcagctgaccagacagggcacaatcatccccgccgacaacacagtgtctctgggagctgttggcaccagcgccgtttctctgggactgacagccaactacgccagaacaggcggacaagtgacagccggcaatgtgcagtctatcatcggcgtgaccttcgtgtaccagcctggcgacggaaatgccgacgtgaccatcaccgtgaacggaaaggtggtggccaagtctggcggcatgcagatctatgagggcaagctgaccgccgagggcctgagatttggaatcgtggccagccggttcaatcacgccctggtggatagactggtggaaggcgccatcgatgccattgtcagacacggcggcagagaagaggacatcaccctcgttagagtgcccggctcttgggagattcctgtggctgctggcgaactggcccggaaagaggatatcgacgccgttatcgccatcggggtgctgatcagaggcgccacacctcacttcgactatatcgccagcgaggtgtccaaaggcctggccgatctgagcctggaactgagaaagcccatcaccttcggcgtgatcaccgctgacacactggaacaggccattgagagagccggcaccaagcacggaaacaaaggatgggaagccgctctgtccgccatcgagatggccaacctgttcaagagcctgcggtgaggactagtccctgttcccagagcccacttttttttctttttttgaaataaaatagcctgtctttcagatctcaaaggctcttttcagagccaccaaaaaaaaaaaaaaaaaaaaaaaaaaaaaaaaaaaaaaaaaaaaaaaaaaaaaaaaaaaaaaaaaaaaaaaaaaaaaaaaaaaaaaaaaaaaaaaaaaaaa

SEQ ID NO: 765 - RNA, 1694 nt, synthetic construct
  misc_feature 1..1694: note Artificial____HsIgE(1-18)_Ec(J96)-FimH(22-300_N28S_V48C_L55 C_N91S_N249Q)_Linker-PGDGN_Ec(J96)-FimG(24-37)_Linker-SGG_L umSynth(1-154_C37A_N102D) mRNA opt3
  source 1..1694: mol_type = other RNA
aggagagtcccgcagtcggcgtccagcggctctgcttgttcgtgtgtgtgtcgttgcaggccttattcaagcttaccatggactggacctggatcctgtttctggtggccgctgccacaagagtgcacagctttgcctgtaaaaccgccagcggcaccgccattcctatcggcggaggatctgccaatgtgtatgtgaatctggccccttgcgtgaacgtgggccagaactgtgtggtggacctgagcacccagatcttttgccacaacgactaccccgagacaatcaccgactacgtgaccctgcagagaggctctgcttacggcggagtgctgagcagcttttccggcaccgtgaagtacagcggcagcagctacccatttcctaccaccagcgagacacccagagtggtgtacaacagcagaaccgacaagccctggcctgtggctctgtacctgacacctgttagctctgctggcggcgtggccattaaggccggatctctgattgccgtgctgatcctgcggcagaccaacaactacaacagcgacgacttccagttcgtgtggaacatctacgccaacaacgacgtggtggtgcctacaggcggctgtgatgtgtctgccagagatgtgaccgtgacactgcctgactaccctggcagcgtgccaattcctctgaccgtgtactgtgccaagagccagaacctgggctactacctgtctggcacaacagccgatgccggcaacagcatcttcaccaacaccgccagcttcagccctgctcaaggtgttggagtgcagctgaccagacagggcacaatcatccccgccaacaataccgtgtctctgggcgctgttggcaccagcgctgtttctctgggactgaccgccaactacgccagaacaggcggacaagtgacagccggcaatgtgcagtctatcatcggcgtgaccttcgtgtaccagcctggcgacggaaatgccgacgtgaccatcaccgtgaacggaaaggtggtggccaagtctggcggcatgcagatctatgagggcaagctgaccgccgagggcctgagatttggaatcgtggccagccggttcaatcacgccctggtggatagactggtggaaggcgccatcgatgccattgtcagacacggcggcagagaagaggacatcaccctcgttagagtgcccggctcttgggagattcctgtggctgctggcgaactggcccggaaagaggatatcgacgccgttatcgccatcggggtgctgatcagaggcgccacacctcacttcgactatatcgccagcgaggtgtccaaaggcctggccgatctgagcctggaactgagaaagcccatcaccttcggcgtgatcaccgctgacacactggaacaggccattgagagagccggcaccaagcacggaaacaaaggatgggaagccgctctgtccgccatcgagatggccaacctgttcaagagcctgcggtgaggactagtccctgttcccagagcccacttttttttctttttttgaaataaaatagcctgtctttcagatctcaaaggctcttttcagagccaccaaaaaaaaaaaaaaaaaaaaaaaaaaaaaaaaaaaaaaaaaaaaaaaaaaaaaaaaaaaaaaaaaaaaaaaaaaaaaaaaaaaaaaaaaaaaaaaaaaaaa

SEQ ID NO: 766 - RNA, 1694 nt, synthetic construct
  misc_feature 1..1694: note Artificial____HsIgE(1-18)_Ec(J96)-FimH(22-300_F165V)_Linker -PGDGN_Ec(J96)-FimG(24-37)_Linker-SGG_LumSynth(1-154_C37A_N 102D) mRNA opt3
  source 1..1694: mol_type = other RNA
aggagagtcccgcagtcggcgtccagcggctctgcttgttcgtgtgtgtgtcgttgcaggccttattcaagcttaccatggactggacctggatcctgtttctggtggccgctgccacaagagtgcacagctttgcctgcaagaccgccaacggcaccgccattcctattggcggaggatccgccaatgtgtatgtgaatctggcccctgtggtcaacgtgggccagaacctggtggtggatctgagcacccagatcttttgccacaacgactaccccgagacaatcaccgactacgtgaccctgcagagaggctctgcttacggcggcgtgctgagcaatttttccggcaccgtgaagtacagcggcagcagctacccatttcctaccaccagcgagacacccagagtggtgtacaacagcagaaccgacaagccctggcctgtggctctgtacctgacacctgttagctctgctggcggcgtggccattaaggccggatctctgattgccgtgctgatcctgcggcagaccaacaactacaacagcgacgacttccaggtcgtgtggaacatctacgccaacaacgacgtggtggtgcctacaggcggctgtgatgtgtctgccagagatgtgaccgtgacactgcctgactaccctggcagcgtgccaattcctctgaccgtgtactgtgccaagagccagaatctgggctactacctgagcggcacaacagccgatgccggcaacagcatcttcaccaacaccgccagcttcagccctgctcaaggtgttggagtgcagctgacccggaacggcacaatcatccccgccaacaataccgtgtctctgggcgctgttggcaccagcgctgtttctctgggactgaccgccaattacgccagaacaggcggacaagtgaccgccggcaatgtgcagtctatcatcggcgtgaccttcgtgtaccagcctggcgacggaaatgccgacgtgaccatcaccgtgaacggaaaggtggtggccaagtctggcggcatgcagatctatgagggcaagctgacagccgagggcctgagatttggaatcgtggccagccggttcaatcacgccctggtggatagactggtggaaggcgccatcgatgccattgtcagacacggcggcagagaagaggacatcaccctcgttagagtgcccggctcttgggagattcctgtggctgctggcgaactggcccggaaagaggatatcgacgccgttatcgccatcggagtgctgatcagaggcgccacacctcacttcgactatatcgccagcgaggtgtccaaaggcctggccgatctgagcctggaactgagaaagcccatcaccttcggcgtgatcaccgctgacacactggaacaggccattgagagagccggcaccaagcacggaaacaaaggatgggaagccgctctgtccgccatcgagatggccaacctgttcaagagcctgcggtgaggactagtccctgttcccagagcccacttttttttctttttttgaaataaaatagcctgtctttcagatctcaaaggctcttttcagagccaccaaaaaaaaaaaaaaaaaaaaaaaaaaaaaaaaaaaaaaaaaaaaaaaaaaaaaaaaaaaaaaaaaaaaaaaaaaaaaaaaaaaaaaaaaaaaaaaaaaaaa

SEQ ID NO: 767 - RNA, 1721 nt, synthetic construct
  misc_feature 1..1721: note Artificial____HsIgE(1-18)_Ec(J96)-FimH(22-300_N28S_N91S_N24 9Q)_Linker-PGDGN_Ec(J96)-FimG(24-37)_Linker-SGG_Ferritin(5- 167_N19Q) mRNA opt3
  source 1..1721: mol_type = other RNA
aggagagtcccgcagtcggcgtccagcggctctgcttgttcgtgtgtgtgtcgttgcaggccttattcaagcttaccatggactggacctggatcctgtttctggtggccgctgccacaagagtgcacagctttgcctgtaaaaccgccagcggcaccgccattcctatcggcggaggatctgccaatgtgtatgtgaatctggcccctgtggtcaacgtgggccagaacctggtggtggatctgagcacccagatcttttgccacaacgactaccccgagacaatcaccgactacgtgaccctgcagagaggctctgcttacggcggagtgctgagcagcttttccggcaccgtgaagtacagcggcagcagctacccatttcctaccaccagcgagacacccagagtggtgtacaacagcagaaccgacaagccctggcctgtggctctgtacctgacacctgttagctctgctggcggcgtggccattaaggccggatctctgattgccgtgctgatcctgcggcagaccaacaactacaacagcgacgacttccagttcgtgtggaacatctacgccaacaacgacgtggtggtgcctacaggcggctgtgatgtgtctgccagagatgtgaccgtgacactgcctgactaccctggcagcgtgccaattcctctgaccgtgtactgtgccaagagccagaatctgggctactacctgagcggcacaacagccgatgccggcaacagcatcttcaccaacaccgccagcttcagccctgctcaaggtgttggagtgcagctgaccagacagggcacaatcatccccgccaacaataccgtgtctctgggcgctgttggcaccagcgctgtttctctgggactgaccgccaactacgccagaacaggcggacaagtgacagccggcaatgtgcagtctatcatcggcgtgaccttcgtgtaccagcctggcgacggaaatgccgacgtgaccatcaccgtgaacggaaaggtggtggccaagtctggcggcgacatcatcaagctgctgaacgagcaagtgaacaaagagatgcagagcagcaacctgtacatgagcatgagcagctggtgctacacccacagccttgatggcgccggactgttcctgtttgatcacgccgccgaggaatacgagcacgccaagaagctgatcatcttcctgaacgagaacaacgtgcccgtccagctgacctctatctctgcccctgagcacaagttcgagggcctgacacagatcttccagaaggcctacgaacacgagcagcacatcagcgagagcatcaacaacatcgtggaccacgccattaagagcaaggatcacgccaccttcaactttctgcagtggtacgtggccgaacagcacgaggaagaggtgctgttcaaggacatcctggacaagatcgagctgatcggcaacgagaaccacggcctgtatctggccgaccagtacgtgaagggaatcgccaagtccagaaagagctgaggactagtccctgttcccagagcccacttttttttctttttttgaaataaaatagcctgtctttcagatctcaaaggctcttttcagagccaccaaaaaaaaaaaaaaaaaaaaaaaaaaaaaaaaaaaaaaaaaaaaaaaaaaaaaaaaaaaaaaaaaaaaaaaaaaaaaaaaaaaaaaaaaaaaaaaaaaaaa

SEQ ID NO: 768 - RNA, 1721 nt, synthetic construct
  misc_feature 1..1721: note Artificial____HsIgE(1-18)_Ec(J96)-FimH(22-300_N28S_N91S_N24 9Q_N256D)_Linker-PGDGN_Ec(J96)-FimG(24-37)_Linker-SGG_Ferri tin(5-167_N19Q) mRNA opt3
  source 1..1721: mol_type = other RNA
aggagagtcccgcagtcggcgtccagcggctctgcttgttcgtgtgtgtgtcgttgcaggccttattcaagcttaccatggactggacctggatcctgtttctggtggccgctgccacaagagtgcacagctttgcctgtaaaaccgccagcggcaccgccattcctatcggcggaggatctgccaatgtgtatgtgaatctggcccctgtggtcaacgtgggccagaacctggtggtggatctgagcacccagatcttttgccacaacgactaccccgagacaatcaccgactacgtgaccctgcagagaggctctgcttacggcggagtgctgagcagcttttccggcaccgtgaagtacagcggcagcagctacccatttcctaccaccagcgagacacccagagtggtgtacaacagcagaaccgacaagccctggcctgtggctctgtacctgacacctgttagctctgctggcggcgtggccattaaggccggatctctgattgccgtgctgatcctgcggcagaccaacaactacaacagcgacgacttccagttcgtgtggaacatctacgccaacaacgacgtggtggtgcctacaggcggctgtgatgtgtctgccagagatgtgaccgtgacactgcctgactaccctggcagcgtgccaattcctctgaccgtgtactgtgccaagagccagaatctgggctactacctgagcggcacaacagccgatgccggcaacagcatcttcaccaacaccgccagcttcagccctgctcaaggtgttggagtgcagctgaccagacagggcacaatcatccccgccgacaacacagtgtctctgggagctgttggcaccagcgccgtttctctgggactgacagccaactacgccagaacaggcggacaagtgacagccggcaatgtgcagtctatcatcggcgtgaccttcgtgtaccagcctggcgacggaaatgccgacgtgaccatcaccgtgaacggaaaggtggtggccaagtctggcggcgacatcatcaagctgctgaacgagcaagtgaacaaagagatgcagagcagcaacctgtacatgagcatgagcagctggtgctacacccacagccttgatggcgccggactgttcctgtttgatcacgccgccgaggaatacgagcacgccaagaagctgatcatcttcctgaacgagaacaacgtgcccgtccagctgacctctatctctgcccctgagcacaagttcgagggcctgacacagatcttccagaaggcctacgaacacgagcagcacatcagcgagagcatcaacaacatcgtggaccacgccattaagagcaaggatcacgccaccttcaactttctgcagtggtacgtggccgaacagcacgaggaagaggtgctgttcaaggacatcctggacaagatcgagctgatcggcaacgagaaccacggcctgtatctggccgaccagtacgtgaagggaatcgccaagtccagaaagagctgaggactagtccctgttcccagagcccacttttttttctttttttgaaataaaatagcctgtctttcagatctcaaaggctcttttcagagccaccaaaaaaaaaaaaaaaaaaaaaaaaaaaaaaaaaaaaaaaaaaaaaaaaaaaaaaaaaaaaaaaaaaaaaaaaaaaaaaaaaaaaaaaaaaaaaaaaaaaaa

SEQ ID NO: 769 - RNA, 1721 nt, synthetic construct
  misc_feature 1..1721: note Artificial____HsIgE(1-18)_Ec(J96)-FimH(22-300_N28S_V48C_L55 C_N91S_N249Q)_Linker-PGDGN_Ec(J96)-FimG(24-37)_Linker-SGG_F erritin(5-167_N19Q) mRNA opt3
  source 1..1721: mol_type = other RNA
aggagagtcccgcagtcggcgtccagcggctctgcttgttcgtgtgtgtgtcgttgcaggccttattcaagcttaccatggactggacctggatcctgtttctggtggccgctgccacaagagtgcacagctttgcctgtaaaaccgccagcggcaccgccattcctatcggcggaggatctgccaatgtgtatgtgaatctggccccttgcgtgaacgtgggccagaactgtgtggtggacctgagcacccagatcttttgccacaacgactaccccgagacaatcaccgactacgtgaccctgcagagaggctctgcttacggcggagtgctgagcagcttttccggcaccgtgaagtacagcggcagcagctacccatttcctaccaccagcgagacacccagagtggtgtacaacagcagaaccgacaagccctggcctgtggctctgtacctgacacctgttagctctgctggcggcgtggccattaaggccggatctctgattgccgtgctgatcctgcggcagaccaacaactacaacagcgacgacttccagttcgtgtggaacatctacgccaacaacgacgtggtggtgcctacaggcggctgtgatgtgtctgccagagatgtgaccgtgacactgcctgactaccctggcagcgtgccaattcctctgaccgtgtactgtgccaagagccagaacctgggctactacctgtctggcacaacagccgatgccggcaacagcatcttcaccaacaccgccagcttcagccctgctcaaggtgttggagtgcagctgaccagacagggcacaatcatccccgccaacaataccgtgtctctgggcgctgttggcaccagcgctgtttctctgggactgaccgccaactacgccagaacaggcggacaagtgacagccggcaatgtgcagtctatcatcggcgtgaccttcgtgtaccagcctggcgacggaaatgccgacgtgaccatcaccgtgaacggaaaggtggtggccaagtctggcggcgacatcatcaagctgctgaacgagcaagtgaacaaagagatgcagagcagcaacctgtacatgagcatgagcagctggtgctacacccacagccttgatggcgccggactgttcctgtttgatcacgccgccgaggaatacgagcacgccaagaagctgatcatcttcctgaacgagaacaacgtgcccgtccagctgacctctatctctgcccctgagcacaagttcgagggcctgacacagatcttccagaaggcctacgaacacgagcagcacatcagcgagagcatcaacaacatcgtggaccacgccattaagagcaaggatcacgccaccttcaactttctgcagtggtacgtggccgaacagcacgaggaagaggtgctgttcaaggacatcctggacaagatcgagctgatcggcaacgagaaccacggcctgtatctggccgaccagtacgtgaagggaatcgccaagtccagaaagagctgaggactagtccctgttcccagagcccacttttttttctttttttgaaataaaatagcctgtctttcagatctcaaaggctcttttcagagccaccaaaaaaaaaaaaaaaaaaaaaaaaaaaaaaaaaaaaaaaaaaaaaaaaaaaaaaaaaaaaaaaaaaaaaaaaaaaaaaaaaaaaaaaaaaaaaaaaaaaaa

SEQ ID NO: 770 - RNA, 1721 nt, synthetic construct
  misc_feature 1..1721: note Artificial____HsIgE(1-18)_Ec(J96)-FimH(22-300_F165V)_Linker -PGDGN_Ec(J96)-FimG(24-37)_Linker-SGG_Ferritin(5-167_N19Q) mRNA opt3
  source 1..1721: mol_type = other RNA
aggagagtcccgcagtcggcgtccagcggctctgcttgttcgtgtgtgtgtcgttgcaggccttattcaagcttaccatggactggacctggatcctgtttctggtggccgctgccacaagagtgcacagctttgcctgcaagaccgccaacggcaccgccattcctattggcggaggatccgccaatgtgtatgtgaatctggcccctgtggtcaacgtgggccagaacctggtggtggatctgagcacccagatcttttgccacaacgactaccccgagacaatcaccgactacgtgaccctgcagagaggctctgcttacggcggcgtgctgagcaatttttccggcaccgtgaagtacagcggcagcagctacccatttcctaccaccagcgagacacccagagtggtgtacaacagcagaaccgacaagccctggcctgtggctctgtacctgacacctgttagctctgctggcggcgtggccattaaggccggatctctgattgccgtgctgatcctgcggcagaccaacaactacaacagcgacgacttccaggtcgtgtggaacatctacgccaacaacgacgtggtggtgcctacaggcggctgtgatgtgtctgccagagatgtgaccgtgacactgcctgactaccctggcagcgtgccaattcctctgaccgtgtactgtgccaagagccagaatctgggctactacctgagcggcacaacagccgatgccggcaacagcatcttcaccaacaccgccagcttcagccctgctcaaggtgttggagtgcagctgacccggaacggcacaatcatccccgccaacaataccgtgtctctgggcgctgttggcaccagcgctgtttctctgggactgaccgccaattacgccagaacaggcggacaagtgaccgccggcaatgtgcagtctatcatcggcgtgaccttcgtgtaccagcctggcgacggaaatgccgacgtgaccatcaccgtgaacggaaaggtggtggccaagtctggcggcgacatcatcaagctgctgaacgagcaagtgaacaaagagatgcagagcagcaacctgtacatgagcatgagcagctggtgctacacccacagccttgatggcgccggactgttcctgtttgaccatgccgccgaggaatacgagcacgccaagaagctgatcatcttcctgaacgagaacaacgtgcccgtccagctgaccagcatttctgcccctgagcacaagttcgagggcctgacacagatcttccagaaggcctacgaacacgagcagcacatcagcgagagcatcaacaacatcgtggaccacgccattaagagcaaggatcacgccaccttcaactttctgcagtggtacgtggccgaacagcacgaggaagaggtgctgttcaaggacatcctggacaagatcgagctgatcggcaacgagaaccacggcctgtatctggccgaccagtacgtgaagggaatcgccaagtccagaaagagctgaggactagtccctgttcccagagcccacttttttttctttttttgaaataaaatagcctgtctttcagatctcaaaggctcttttcagagccaccaaaaaaaaaaaaaaaaaaaaaaaaaaaaaaaaaaaaaaaaaaaaaaaaaaaaaaaaaaaaaaaaaaaaaaaaaaaaaaaaaaaaaaaaaaaaaaaaaaaaa

SEQ ID NO: 771 - RNA, 998 nt, synthetic construct
  misc_feature 1..998: note Artificial____Ec(J96)-FimC(1-36)_Ec(J96)-FimC(37-241) mRNA opt4
  source 1..998: mol_type = other RNA
aggagagtcccgcagtcggcgtccagcggctctgcttgttcgtgtgtgtgtcgttgcaggccttattcaagcttaccatgagcaacaagaacgtgaacgtgagaaagagccaggagatcaccttctgcctgctggccggcatcctgatgttcatggccatgatggtggccggcagagccgaggccggcgtggccctgggcgccaccagagtgatctaccccgccggccagaagcaggtgcagctggccgtgaccaacaacgacgagaacagcacctacctgatccagagctgggtggagaacgccgacggcgtgaaggacggcagattcatcgtgaccccccccctgttcgccatgaagggcaagaaggagaacaccctgagaatcctggacgccaccaacaaccagctgccccaggacagagagagcctgttctggatgaacgtgaaggccatccccagcatggacaagagcaagctgaccgagaacaccctgcagctggccatcatcagcagaatcaagctgtactacagacccgccaagctggccctgccccccgaccaggccgccgagaagctgagattcagaagaagcgccaacagcctgaccctgatcaaccccaccccctactacctgaccgtgaccgagctgaacgccggcaccagagtgctggagaacgccctggtgccccccatgggcgagagcaccgtgaagctgcccagcgacgccggcagcaacatcacctacagaaccatcaacgactacggcgccctgacccccaagatgaccggcgtgatggagtgaggactagtccctgttcccagagcccacttttttttctttttttgaaataaaatagcctgtctttcagatctcaaaggctcttttcagagccaccaaaaaaaaaaaaaaaaaaaaaaaaaaaaaaaaaaaaaaaaaaaaaaaaaaaaaaaaaaaaaaaaaaaaaaaaaaaaaaaaaaaaaaaaaaaaaaaaaaaaa

SEQ ID NO: 772 - RNA, 944 nt, synthetic construct
  misc_feature 1..944: note = Artificial____HsIgE(1-18)_Ec(J96)-FimC(37-241) mRNA opt4
  source 1..944: mol_type = other RNA
aggagagtcccgcagtcggcgtccagcggctctgcttgttcgtgtgtgtgtcgttgcaggccttattcaagcttaccatggactggacctggatcctgttcctggtggccgccgccaccagagtgcacagcggcgtggccctgggcgccaccagagtgatctaccccgccggccagaagcaggtgcagctggccgtgaccaacaacgacgagaacagcacctacctgatccagagctgggtggagaacgccgacggcgtgaaggacggcagattcatcgtgaccccccccctgttcgccatgaagggcaagaaggagaacaccctgagaatcctggacgccaccaacaaccagctgccccaggacagagagagcctgttctggatgaacgtgaaggccatccccagcatggacaagagcaagctgaccgagaacaccctgcagctggccatcatcagcagaatcaagctgtactacagacccgccaagctggccctgccccccgaccaggccgccgagaagctgagattcagaagaagcgccaacagcctgaccctgatcaaccccaccccctactacctgaccgtgaccgagctgaacgccggcaccagagtgctggagaacgccctggtgccccccatgggcgagagcaccgtgaagctgcccagcgacgccggcagcaacatcacctacagaaccatcaacgactacggcgccctgacccccaagatgaccggcgtgatggagtgaggactagtccctgttcccagagcccacttttttttctttttttgaaataaaatagcctgtctttcagatctcaaaggctcttttcagagccaccaaaaaaaaaaaaaaaaaaaaaaaaaaaaaaaaaaaaaaaaaaaaaaaaaaaaaaaaaaaaaaaaaaaaaaaaaaaaaaaaaaaaaaaaaaaaaaaaaaaaa

SEQ ID NO: 773 - RNA, 1175 nt, synthetic construct
  misc_feature 1..1175: note Artificial____Ec(J96)-FimH(1-21)_Ec(J96)-FimH(22-300) mRNA opt4
  source 1..1175: mol_type = other RNA
aggagagtcccgcagtcggcgtccagcggctctgcttgttcgtgtgtgtgtcgttgcaggccttattcaagcttaccatgaagagagtgatcaccctgttcgccgtgctgctgatgggctggagcgtgaacgcctggagcttcgcctgcaagaccgccaacggcaccgccatccccatcggcggcggcagcgccaacgtgtacgtgaacctggcccccgtggtgaacgtgggccagaacctggtggtggacctgagcacccagatcttctgccacaacgactaccccgagaccatcaccgactacgtgaccctgcagagaggcagcgcctacggcggcgtgctgagcaacttcagcggcaccgtgaagtacagcggcagcagctaccccttccccaccaccagcgagacccccagagtggtgtacaacagcagaaccgacaagccctggcccgtggccctgtacctgacccccgtgagcagcgccggcggcgtggccatcaaggccggcagcctgatcgccgtgctgatcctgagacagaccaacaactacaacagcgacgacttccagttcgtgtggaacatctacgccaacaacgacgtggtggtgcccaccggcggctgcgacgtgagcgccagagacgtgaccgtgaccctgcccgactaccccggcagcgtgcccatccccctgaccgtgtactgcgccaagagccagaacctgggctactacctgagcggcaccaccgccgacgccggcaacagcatcttcaccaacaccgccagcttcagccccgcccagggcgtgggcgtgcagctgaccagaaacggcaccatcatccccgccaacaacaccgtgagcctgggcgccgtgggcaccagcgccgtgagcctgggcctgaccgccaactacgccagaaccggcggccaggtgaccgccggcaacgtgcagagcatcatcggcgtgaccttcgtgtaccagtgaggactagtccctgttcccagagcccacttttttttctttttttgaaataaaatagcctgtctttcagatctcaaaggctcttttcagagccaccaaaaaaaaaaaaaaaaaaaaaaaaaaaaaaaaaaaaaaaaaaaaaaaaaaaaaaaaaaaaaaaaaaaaaaaaaaaaaaaaaaaaaaaaaaaaaaaaaaaaa

SEQ ID NO: 774 - RNA, 1166 nt, synthetic construct
  misc_feature 1..1166: note = Artificial____HsIgE(1-18)_Ec(J96)-FimH(22-300) mRNA opt4
  source 1..1166: mol_type = other RNA
aggagagtcccgcagtcggcgtccagcggctctgcttgttcgtgtgtgtgtcgttgcaggccttattcaagcttaccatggactggacctggatcctgttcctggtggccgccgccaccagagtgcacagcttcgcctgcaagaccgccaacggcaccgccatccccatcggcggcggcagcgccaacgtgtacgtgaacctggcccccgtggtgaacgtgggccagaacctggtggtggacctgagcacccagatcttctgccacaacgactaccccgagaccatcaccgactacgtgaccctgcagagaggcagcgcctacggcggcgtgctgagcaacttcagcggcaccgtgaagtacagcggcagcagctaccccttccccaccaccagcgagacccccagagtggtgtacaacagcagaaccgacaagccctggcccgtggccctgtacctgacccccgtgagcagcgccggcggcgtggccatcaaggccggcagcctgatcgccgtgctgatcctgagacagaccaacaactacaacagcgacgacttccagttcgtgtggaacatctacgccaacaacgacgtggtggtgcccaccggcggctgcgacgtgagcgccagagacgtgaccgtgaccctgcccgactaccccggcagcgtgcccatccccctgaccgtgtactgcgccaagagccagaacctgggctactacctgagcggcaccaccgccgacgccggcaacagcatcttcaccaacaccgccagcttcagccccgcccagggcgtgggcgtgcagctgaccagaaacggcaccatcatccccgccaacaacaccgtgagcctgggcgccgtgggcaccagcgccgtgagcctgggcctgaccgccaactacgccagaaccggcggccaggtgaccgccggcaacgtgcagagcatcatcggcgtgaccttcgtgtaccagtgaggactagtccctgttcccagagcccacttttttttctttttttgaaataaaatagcctgtctttcagatctcaaaggctcttttcagagccaccaaaaaaaaaaaaaaaaaaaaaaaaaaaaaaaaaaaaaaaaaaaaaaaaaaaaaaaaaaaaaaaaaaaaaaaaaaaaaaaaaaaaaaaaaaaaaaaaaaaaa

SEQ ID NO: 775 - RNA, 1172 nt, synthetic construct
  misc_feature 1..1172: note = Artificial____MmIgK(1-20)_Ec(J96)-FimH(22-300) mRNA opt4
  source 1..1172: mol_type = other RNA
aggagagtcccgcagtcggcgtccagcggctctgcttgttcgtgtgtgtgtcgttgcaggccttattcaagcttaccatggagaccgacaccctgctgctgtgggtgctgctgctgtgggtgcccggcagcaccggcttcgcctgcaagaccgccaacggcaccgccatccccatcggcggcggcagcgccaacgtgtacgtgaacctggcccccgtggtgaacgtgggccagaacctggtggtggacctgagcacccagatcttctgccacaacgactaccccgagaccatcaccgactacgtgaccctgcagagaggcagcgcctacggcggcgtgctgagcaacttcagcggcaccgtgaagtacagcggcagcagctaccccttccccaccaccagcgagacccccagagtggtgtacaacagcagaaccgacaagccctggcccgtggccctgtacctgacccccgtgagcagcgccggcggcgtggccatcaaggccggcagcctgatcgccgtgctgatcctgagacagaccaacaactacaacagcgacgacttccagttcgtgtggaacatctacgccaacaacgacgtggtggtgcccaccggcggctgcgacgtgagcgccagagacgtgaccgtgaccctgcccgactaccccggcagcgtgcccatccccctgaccgtgtactgcgccaagagccagaacctgggctactacctgagcggcaccaccgccgacgccggcaacagcatcttcaccaacaccgccagcttcagccccgcccagggcgtgggcgtgcagctgaccagaaacggcaccatcatccccgccaacaacaccgtgagcctgggcgccgtgggcaccagcgccgtgagcctgggcctgaccgccaactacgccagaaccggcggccaggtgaccgccggcaacgtgcagagcatcatcggcgtgaccttcgtgtaccagtgaggactagtccctgttcccagagcccacttttttttctttttttgaaataaaatagcctgtctttcagatctcaaaggctcttttcagagccaccaaaaaaaaaaaaaaaaaaaaaaaaaaaaaaaaaaaaaaaaaaaaaaaaaaaaaaaaaaaaaaaaaaaaaaaaaaaaaaaaaaaaaaaaaaaaaaaaaaaaa

SEQ ID NO: 776 - RNA, 1232 nt, synthetic construct
  misc_feature 1..1232: note Artificial____Ec(J96)-FimH(1-21)_Ec(J96)-FimH(22-300)_Linke r-PGDGN_Ec(J96)-FimG(24-37) mRNA opt4
  source 1..1232: mol_type = other RNA
aggagagtcccgcagtcggcgtccagcggctctgcttgttcgtgtgtgtgtcgttgcaggccttattcaagcttaccatgaagagagtgatcaccctgttcgccgtgctgctgatgggctggagcgtgaacgcctggagcttcgcctgcaagaccgccaacggcaccgccatccccatcggcggcggcagcgccaacgtgtacgtgaacctggcccccgtggtgaacgtgggccagaacctggtggtggacctgagcacccagatcttctgccacaacgactaccccgagaccatcaccgactacgtgaccctgcagagaggcagcgcctacggcggcgtgctgagcaacttcagcggcaccgtgaagtacagcggcagcagctaccccttccccaccaccagcgagacccccagagtggtgtacaacagcagaaccgacaagccctggcccgtggccctgtacctgacccccgtgagcagcgccggcggcgtggccatcaaggccggcagcctgatcgccgtgctgatcctgagacagaccaacaactacaacagcgacgacttccagttcgtgtggaacatctacgccaacaacgacgtggtggtgcccaccggcggctgcgacgtgagcgccagagacgtgaccgtgaccctgcccgactaccccggcagcgtgcccatccccctgaccgtgtactgcgccaagagccagaacctgggctactacctgagcggcaccaccgccgacgccggcaacagcatcttcaccaacaccgccagcttcagccccgcccagggcgtgggcgtgcagctgaccagaaacggcaccatcatccccgccaacaacaccgtgagcctgggcgccgtgggcaccagcgccgtgagcctgggcctgaccgccaactacgccagaaccggcggccaggtgaccgccggcaacgtgcagagcatcatcggcgtgaccttcgtgtaccagcccggcgacggcaacgccgacgtgaccatcaccgtgaacggcaaggtggtggccaagtgaggactagtccctgttcccagagcccacttttttttctttttttgaaataaaatagcctgtctttcagatctcaaaggctcttttcagagccaccaaaaaaaaaaaaaaaaaaaaaaaaaaaaaaaaaaaaaaaaaaaaaaaaaaaaaaaaaaaaaaaaaaaaaaaaaaaaaaaaaaaaaaaaaaaaaaaaaaaaa

SEQ ID NO: 777 - RNA, 1223 nt, synthetic construct
  misc_feature 1..1223: note Artificial____HsIgE(1-18)_Ec(J96)-FimH(22-300)_Linker-PGDGN _Ec(J96)-FimG(24-37) mRNA opt4
  source 1..1223: mol_type = other RNA
aggagagtcccgcagtcggcgtccagcggctctgcttgttcgtgtgtgtgtcgttgcaggccttattcaagcttaccatggactggacctggatcctgttcctggtggccgccgccaccagagtgcacagcttcgcctgcaagaccgccaacggcaccgccatccccatcggcggcggcagcgccaacgtgtacgtgaacctggcccccgtggtgaacgtgggccagaacctggtggtggacctgagcacccagatcttctgccacaacgactaccccgagaccatcaccgactacgtgaccctgcagagaggcagcgcctacggcggcgtgctgagcaacttcagcggcaccgtgaagtacagcggcagcagctaccccttccccaccaccagcgagacccccagagtggtgtacaacagcagaaccgacaagccctggcccgtggccctgtacctgacccccgtgagcagcgccggcggcgtggccatcaaggccggcagcctgatcgccgtgctgatcctgagacagaccaacaactacaacagcgacgacttccagttcgtgtggaacatctacgccaacaacgacgtggtggtgcccaccggcggctgcgacgtgagcgccagagacgtgaccgtgaccctgcccgactaccccggcagcgtgcccatccccctgaccgtgtactgcgccaagagccagaacctgggctactacctgagcggcaccaccgccgacgccggcaacagcatcttcaccaacaccgccagcttcagccccgcccagggcgtgggcgtgcagctgaccagaaacggcaccatcatccccgccaacaacaccgtgagcctgggcgccgtgggcaccagcgccgtgagcctgggcctgaccgccaactacgccagaaccggcggccaggtgaccgccggcaacgtgcagagcatcatcggcgtgaccttcgtgtaccagcccggcgacggcaacgccgacgtgaccatcaccgtgaacggcaaggtggtggccaagtgaggactagtccctgttcccagagcccacttttttttctttttttgaaataaaatagcctgtctttcagatctcaaaggctcttttcagagccaccaaaaaaaaaaaaaaaaaaaaaaaaaaaaaaaaaaaaaaaaaaaaaaaaaaaaaaaaaaaaaaaaaaaaaaaaaaaaaaaaaaaaaaaaaaaaaaaaaaaaa

SEQ ID NO: 778 - RNA, 1229 nt, synthetic construct
  misc_feature 1..1229: note Artificial____HsIgE(1-18)_Ec(J96)-FimH(22-300)_Linker-G4SGG _Ec(J96)-FimG(24-37) mRNA opt4
  source 1..1229: mol_type = other RNA
aggagagtcccgcagtcggcgtccagcggctctgcttgttcgtgtgtgtgtcgttgcaggccttattcaagcttaccatggactggacctggatcctgttcctggtggccgccgccaccagagtgcacagcttcgcctgcaagaccgccaacggcaccgccatccccatcggcggcggcagcgccaacgtgtacgtgaacctggcccccgtggtgaacgtgggccagaacctggtggtggacctgagcacccagatcttctgccacaacgactaccccgagaccatcaccgactacgtgaccctgcagagaggcagcgcctacggcggcgtgctgagcaacttcagcggcaccgtgaagtacagcggcagcagctaccccttccccaccaccagcgagacccccagagtggtgtacaacagcagaaccgacaagccctggcccgtggccctgtacctgacccccgtgagcagcgccggcggcgtggccatcaaggccggcagcctgatcgccgtgctgatcctgagacagaccaacaactacaacagcgacgacttccagttcgtgtggaacatctacgccaacaacgacgtggtggtgcccaccggcggctgcgacgtgagcgccagagacgtgaccgtgaccctgcccgactaccccggcagcgtgcccatccccctgaccgtgtactgcgccaagagccagaacctgggctactacctgagcggcaccaccgccgacgccggcaacagcatcttcaccaacaccgccagcttcagccccgcccagggcgtgggcgtgcagctgaccagaaacggcaccatcatccccgccaacaacaccgtgagcctgggcgccgtgggcaccagcgccgtgagcctgggcctgaccgccaactacgccagaaccggcggccaggtgaccgccggcaacgtgcagagcatcatcggcgtgaccttcgtgtaccagggcggcggcggcagcggcggcgccgacgtgaccatcaccgtgaacggcaaggtggtggccaagtgaggactagtccctgttcccagagcccacttttttttctttttttgaaataaaatagcctgtctttcagatctcaaaggctcttttcagagccaccaaaaaaaaaaaaaaaaaaaaaaaaaaaaaaaaaaaaaaaaaaaaaaaaaaaaaaaaaaaaaaaaaaaaaaaaaaaaaaaaaaaaaaaaaaaaaaaaaaaaa

SEQ ID NO: 779 - RNA, 1229 nt, synthetic construct
  misc_feature 1..1229: note Artificial____MmIgK(1-20)_Ec(J96)-FimH(22-300)_Linker-PGDGN _Ec(J96)-FimG(24-37) mRNA opt4
  source 1..1229: mol_type = other RNA
aggagagtcccgcagtcggcgtccagcggctctgcttgttcgtgtgtgtgtcgttgcaggccttattcaagcttaccatggagaccgacaccctgctgctgtgggtgctgctgctgtgggtgcccggcagcaccggcttcgcctgcaagaccgccaacggcaccgccatccccatcggcggcggcagcgccaacgtgtacgtgaacctggcccccgtggtgaacgtgggccagaacctggtggtggacctgagcacccagatcttctgccacaacgactaccccgagaccatcaccgactacgtgaccctgcagagaggcagcgcctacggcggcgtgctgagcaacttcagcggcaccgtgaagtacagcggcagcagctaccccttccccaccaccagcgagacccccagagtggtgtacaacagcagaaccgacaagccctggcccgtggccctgtacctgacccccgtgagcagcgccggcggcgtggccatcaaggccggcagcctgatcgccgtgctgatcctgagacagaccaacaactacaacagcgacgacttccagttcgtgtggaacatctacgccaacaacgacgtggtggtgcccaccggcggctgcgacgtgagcgccagagacgtgaccgtgaccctgcccgactaccccggcagcgtgcccatccccctgaccgtgtactgcgccaagagccagaacctgggctactacctgagcggcaccaccgccgacgccggcaacagcatcttcaccaacaccgccagcttcagccccgcccagggcgtgggcgtgcagctgaccagaaacggcaccatcatccccgccaacaacaccgtgagcctgggcgccgtgggcaccagcgccgtgagcctgggcctgaccgccaactacgccagaaccggcggccaggtgaccgccggcaacgtgcagagcatcatcggcgtgaccttcgtgtaccagcccggcgacggcaacgccgacgtgaccatcaccgtgaacggcaaggtggtggccaagtgaggactagtccctgttcccagagcccacttttttttctttttttgaaataaaatagcctgtctttcagatctcaaaggctcttttcagagccaccaaaaaaaaaaaaaaaaaaaaaaaaaaaaaaaaaaaaaaaaaaaaaaaaaaaaaaaaaaaaaaaaaaaaaaaaaaaaaaaaaaaaaaaaaaaaaaaaaaaaa

SEQ ID NO: 780 - RNA, 1229 nt, synthetic construct
  misc_feature 1..1229: note Artificial____MmIgK(1-20)_Ec(536)-FimH(22-300)_Linker-PGDGN _Ec(J96)-FimG(24-37) mRNA opt4
  source 1..1229: mol_type = other RNA
aggagagtcccgcagtcggcgtccagcggctctgcttgttcgtgtgtgtgtcgttgcaggccttattcaagcttaccatggagaccgacaccctgctgctgtgggtgctgctgctgtgggtgcccggcagcaccggcttcgcctgcaagaccgccaacggcaccgccatccccatcggcggcggcagcgccaacgtgtacgtgaacctggcccccgccgtgaacgtgggccagaacctggtggtggacctgagcacccagatcttctgccacaacgactaccccgagaccatcaccgactacgtgaccctgcagagaggcagcgcctacggcggcgtgctgagcagcttcagcggcaccgtgaagtacaacggcagcagctaccccttccccaccaccagcgagacccccagagtggtgtacaacagcagaaccgacaagccctggcccgtggccctgtacctgacccccgtgagcagcgccggcggcgtggccatcaaggccggcagcctgatcgccgtgctgatcctgagacagaccaacaactacaacagcgacgacttccagttcgtgtggaacatctacgccaacaacgacgtggtggtgcccaccggcggctgcgacgtgagcgccagagacgtgaccgtgaccctgcccgactaccccggcagcgtgcccatccccctgaccgtgtactgcgccaagagccagaacctgggctactacctgagcggcaccaccgccgacgccggcaacagcatcttcaccaacaccgccagcttcagccccgcccagggcgtgggcgtgcagctgaccagaaacggcaccatcatccccgccaacaacaccgtgagcctgggcgccgtgggcaccagcgccgtgagcctgggcctgaccgccaactacgccagaaccggcggccaggtgaccgccggcaacgtgcagagcatcatcggcgtgaccttcgtgtaccagcccggcgacggcaacgccgacgtgaccatcaccgtgaacggcaaggtggtggccaagtgaggactagtccctgttcccagagcccacttttttttctttttttgaaataaaatagcctgtctttcagatctcaaaggctcttttcagagccaccaaaaaaaaaaaaaaaaaaaaaaaaaaaaaaaaaaaaaaaaaaaaaaaaaaaaaaaaaaaaaaaaaaaaaaaaaaaaaaaaaaaaaaaaaaaaaaaaaaaaa

SEQ ID NO: 781 - RNA, 1253 nt, synthetic construct
  misc_feature 1..1253: note Artificial____HsIgE(1-18)_Ec(J96)-FimH(22-300)_Linker-(G4S) 3_Ec(J96)-FimC(135-148) mRNA opt4
  source 1..1253: mol_type = other RNA
aggagagtcccgcagtcggcgtccagcggctctgcttgttcgtgtgtgtgtcgttgcaggccttattcaagcttaccatggactggacctggatcctgttcctggtggccgccgccaccagagtgcacagcttcgcctgcaagaccgccaacggcaccgccatccccatcggcggcggcagcgccaacgtgtacgtgaacctggcccccgtggtgaacgtgggccagaacctggtggtggacctgagcacccagatcttctgccacaacgactaccccgagaccatcaccgactacgtgaccctgcagagaggcagcgcctacggcggcgtgctgagcaacttcagcggcaccgtgaagtacagcggcagcagctaccccttccccaccaccagcgagacccccagagtggtgtacaacagcagaaccgacaagccctggcccgtggccctgtacctgacccccgtgagcagcgccggcggcgtggccatcaaggccggcagcctgatcgccgtgctgatcctgagacagaccaacaactacaacagcgacgacttccagttcgtgtggaacatctacgccaacaacgacgtggtggtgcccaccggcggctgcgacgtgagcgccagagacgtgaccgtgaccctgcccgactaccccggcagcgtgcccatccccctgaccgtgtactgcgccaagagccagaacctgggctactacctgagcggcaccaccgccgacgccggcaacagcatcttcaccaacaccgccagcttcagccccgcccagggcgtgggcgtgcagctgaccagaaacggcaccatcatccccgccaacaacaccgtgagcctgggcgccgtgggcaccagcgccgtgagcctgggcctgaccgccaactacgccagaaccggcggccaggtgaccgccggcaacgtgcagagcatcatcggcgtgaccttcgtgtaccagggcggcggcggcagcggcggcggcggcagcggcggcggcggcagcaccgagaacaccctgcagctggccatcatcagcagaatcaagtgaggactagtccctgttcccagagcccacttttttttctttttttgaaataaaatagcctgtctttcagatctcaaaggctcttttcagagccaccaaaaaaaaaaaaaaaaaaaaaaaaaaaaaaaaaaaaaaaaaaaaaaaaaaaaaaaaaaaaaaaaaaaaaaaaaaaaaaaaaaaaaaaaaaaaaaaaaaaaa

SEQ ID NO: 782 - RNA, 1676 nt, synthetic construct
  misc_feature 1..1676: note Artificial____LumSynth(1-154_C37A_N102D)_Linker(GGS)4-GGG_E c(J96)-FimH(22-300)_Linker-PGDGN_Ec(J96)-FimG(24-37) mRNA opt4
  source 1..1676: mol_type = other RNA
aggagagtcccgcagtcggcgtccagcggctctgcttgttcgtgtgtgtgtcgttgcaggccttattcaagcttaccatgcagatctacgagggcaagctgaccgccgagggcctgagattcggcatcgtggccagcagattcaaccacgccctggtggacagactggtggagggcgccatcgacgccatcgtgagacacggcggcagagaggaggacatcaccctggtgagagtgcccggcagctgggagatccccgtggccgccggcgagctggccagaaaggaggacatcgacgccgtgatcgccatcggcgtgctgatcagaggcgccaccccccacttcgactacatcgccagcgaggtgagcaagggcctggccgacctgagcctggagctgagaaagcccatcaccttcggcgtgatcaccgccgacaccctggagcaggccatcgagagagccggcaccaagcacggcaacaagggctgggaggccgccctgagcgccatcgagatggccaacctgttcaagagcctgagaggcggcagcggcggcagcggcggcagcggcggcagcggcggcggcttcgcctgcaagaccgccaacggcaccgccatccccatcggcggcggcagcgccaacgtgtacgtgaacctggcccccgtggtgaacgtgggccagaacctggtggtggacctgagcacccagatcttctgccacaacgactaccccgagaccatcaccgactacgtgaccctgcagagaggcagcgcctacggcggcgtgctgagcaacttcagcggcaccgtgaagtacagcggcagcagctaccccttccccaccaccagcgagacccccagagtggtgtacaacagcagaaccgacaagccctggcccgtggccctgtacctgacccccgtgagcagcgccggcggcgtggccatcaaggccggcagcctgatcgccgtgctgatcctgagacagaccaacaactacaacagcgacgacttccagttcgtgtggaacatctacgccaacaacgacgtggtggtgcccaccggcggctgcgacgtgagcgccagagacgtgaccgtgaccctgcccgactaccccggcagcgtgcccatccccctgaccgtgtactgcgccaagagccagaacctgggctactacctgagcggcaccaccgccgacgccggcaacagcatcttcaccaacaccgccagcttcagccccgcccagggcgtgggcgtgcagctgaccagaaacggcaccatcatccccgccaacaacaccgtgagcctgggcgccgtgggcaccagcgccgtgagcctgggcctgaccgccaactacgccagaaccggcggccaggtgaccgccggcaacgtgcagagcatcatcggcgtgaccttcgtgtaccagcccggcgacggcaacgccgacgtgaccatcaccgtgaacggcaaggtggtggccaagtgaggactagtccctgttcccagagcccacttttttttctttttttgaaataaaatagcctgtctttcagatctcaaaggctcttttcagagccaccaaaaaaaaaaaaaaaaaaaaaaaaaaaaaaaaaaaaaaaaaaaaaaaaaaaaaaaaaaaaaaaaaaaaaaaaaaaaaaaaaaaaaaaaaaaaaaaaaaaaa

SEQ ID NO: 783 - RNA, 1694 nt, synthetic construct
  misc_feature 1..1694: note Artificial____HsIgE(1-18)_Ec(J96)-FimH(22-300)_Linker-PGDGN _Ec(J96)-FimG(24-37)_Linker-SGG_LumSynth(1-154_C37A_N102D) mRNA opt4
  source 1..1694: mol_type = other RNA
aggagagtcccgcagtcggcgtccagcggctctgcttgttcgtgtgtgtgtcgttgcaggccttattcaagcttaccatggactggacctggatcctgttcctggtggccgccgccaccagagtgcacagcttcgcctgcaagaccgccaacggcaccgccatccccatcggcggcggcagcgccaacgtgtacgtgaacctggcccccgtggtgaacgtgggccagaacctggtggtggacctgagcacccagatcttctgccacaacgactaccccgagaccatcaccgactacgtgaccctgcagagaggcagcgcctacggcggcgtgctgagcaacttcagcggcaccgtgaagtacagcggcagcagctaccccttccccaccaccagcgagacccccagagtggtgtacaacagcagaaccgacaagccctggcccgtggccctgtacctgacccccgtgagcagcgccggcggcgtggccatcaaggccggcagcctgatcgccgtgctgatcctgagacagaccaacaactacaacagcgacgacttccagttcgtgtggaacatctacgccaacaacgacgtggtggtgcccaccggcggctgcgacgtgagcgccagagacgtgaccgtgaccctgcccgactaccccggcagcgtgcccatccccctgaccgtgtactgcgccaagagccagaacctgggctactacctgagcggcaccaccgccgacgccggcaacagcatcttcaccaacaccgccagcttcagccccgcccagggcgtgggcgtgcagctgaccagaaacggcaccatcatccccgccaacaacaccgtgagcctgggcgccgtgggcaccagcgccgtgagcctgggcctgaccgccaactacgccagaaccggcggccaggtgaccgccggcaacgtgcagagcatcatcggcgtgaccttcgtgtaccagcccggcgacggcaacgccgacgtgaccatcaccgtgaacggcaaggtggtggccaagagcggcggcatgcagatctacgagggcaagctgaccgccgagggcctgagattcggcatcgtggccagcagattcaaccacgccctggtggacagactggtggagggcgccatcgacgccatcgtgagacacggcggcagagaggaggacatcaccctggtgagagtgcccggcagctgggagatccccgtggccgccggcgagctggccagaaaggaggacatcgacgccgtgatcgccatcggcgtgctgatcagaggcgccaccccccacttcgactacatcgccagcgaggtgagcaagggcctggccgacctgagcctggagctgagaaagcccatcaccttcggcgtgatcaccgccgacaccctggagcaggccatcgagagagccggcaccaagcacggcaacaagggctgggaggccgccctgagcgccatcgagatggccaacctgttcaagagcctgagatgaggactagtccctgttcccagagcccacttttttttctttttttgaaataaaatagcctgtctttcagatctcaaaggctcttttcagagccaccaaaaaaaaaaaaaaaaaaaaaaaaaaaaaaaaaaaaaaaaaaaaaaaaaaaaaaaaaaaaaaaaaaaaaaaaaaaaaaaaaaaaaaaaaaaaaaaaaaaaa

SEQ ID NO: 784 - RNA, 1721 nt, synthetic construct
  misc_feature 1..1721: note Artificial____HsIgE(1-18)_Ec(J96)-FimH(22-300)_Linker-PGDGN _Ec(J96)-FimG(24-37)_Linker-SGG_Ferritin(5-167_N19Q) mRNA opt4
  source 1..1721: mol_type = other RNA
aggagagtcccgcagtcggcgtccagcggctctgcttgttcgtgtgtgtgtcgttgcaggccttattcaagcttaccatggactggacctggatcctgttcctggtggccgccgccaccagagtgcacagcttcgcctgcaagaccgccaacggcaccgccatccccatcggcggcggcagcgccaacgtgtacgtgaacctggcccccgtggtgaacgtgggccagaacctggtggtggacctgagcacccagatcttctgccacaacgactaccccgagaccatcaccgactacgtgaccctgcagagaggcagcgcctacggcggcgtgctgagcaacttcagcggcaccgtgaagtacagcggcagcagctaccccttccccaccaccagcgagacccccagagtggtgtacaacagcagaaccgacaagccctggcccgtggccctgtacctgacccccgtgagcagcgccggcggcgtggccatcaaggccggcagcctgatcgccgtgctgatcctgagacagaccaacaactacaacagcgacgacttccagttcgtgtggaacatctacgccaacaacgacgtggtggtgcccaccggcggctgcgacgtgagcgccagagacgtgaccgtgaccctgcccgactaccccggcagcgtgcccatccccctgaccgtgtactgcgccaagagccagaacctgggctactacctgagcggcaccaccgccgacgccggcaacagcatcttcaccaacaccgccagcttcagccccgcccagggcgtgggcgtgcagctgaccagaaacggcaccatcatccccgccaacaacaccgtgagcctgggcgccgtgggcaccagcgccgtgagcctgggcctgaccgccaactacgccagaaccggcggccaggtgaccgccggcaacgtgcagagcatcatcggcgtgaccttcgtgtaccagcccggcgacggcaacgccgacgtgaccatcaccgtgaacggcaaggtggtggccaagagcggcggcgacatcatcaagctgctgaacgagcaggtgaacaaggagatgcagagcagcaacctgtacatgagcatgagcagctggtgctacacccacagcctggacggcgccggcctgttcctgttcgaccacgccgccgaggagtacgagcacgccaagaagctgatcatcttcctgaacgagaacaacgtgcccgtgcagctgaccagcatcagcgcccccgagcacaagttcgagggcctgacccagatcttccagaaggcctacgagcacgagcagcacatcagcgagagcatcaacaacatcgtggaccacgccatcaagagcaaggaccacgccaccttcaacttcctgcagtggtacgtggccgagcagcacgaggaggaggtgctgttcaaggacatcctggacaagatcgagctgatcggcaacgagaaccacggcctgtacctggccgaccagtacgtgaagggcatcgccaagagcagaaagagctgaggactagtccctgttcccagagcccacttttttttctttttttgaaataaaatagcctgtctttcagatctcaaaggctcttttcagagccaccaaaaaaaaaaaaaaaaaaaaaaaaaaaaaaaaaaaaaaaaaaaaaaaaaaaaaaaaaaaaaaaaaaaaaaaaaaaaaaaaaaaaaaaaaaaaaaaaaaaaa

SEQ ID NO: 785 - RNA, 1751 nt, synthetic construct
  misc_feature 1..1751: note Artificial____MmIgK(1-20)_Ec(J96)-FimH(22-300)_Linker-PGDGN _Ec(J96)-FimG(24-37)_Linker-(GGS)4_Ferritin(5-166) mRNA opt4
  source 1..1751: mol_type = other RNA
aggagagtcccgcagtcggcgtccagcggctctgcttgttcgtgtgtgtgtcgttgcaggccttattcaagcttaccatggagaccgacaccctgctgctgtgggtgctgctgctgtgggtgcccggcagcaccggcttcgcctgcaagaccgccaacggcaccgccatccccatcggcggcggcagcgccaacgtgtacgtgaacctggcccccgtggtgaacgtgggccagaacctggtggtggacctgagcacccagatcttctgccacaacgactaccccgagaccatcaccgactacgtgaccctgcagagaggcagcgcctacggcggcgtgctgagcaacttcagcggcaccgtgaagtacagcggcagcagctaccccttccccaccaccagcgagacccccagagtggtgtacaacagcagaaccgacaagccctggcccgtggccctgtacctgacccccgtgagcagcgccggcggcgtggccatcaaggccggcagcctgatcgccgtgctgatcctgagacagaccaacaactacaacagcgacgacttccagttcgtgtggaacatctacgccaacaacgacgtggtggtgcccaccggcggctgcgacgtgagcgccagagacgtgaccgtgaccctgcccgactaccccggcagcgtgcccatccccctgaccgtgtactgcgccaagagccagaacctgggctactacctgagcggcaccaccgccgacgccggcaacagcatcttcaccaacaccgccagcttcagccccgcccagggcgtgggcgtgcagctgaccagaaacggcaccatcatccccgccaacaacaccgtgagcctgggcgccgtgggcaccagcgccgtgagcctgggcctgaccgccaactacgccagaaccggcggccaggtgaccgccggcaacgtgcagagcatcatcggcgtgaccttcgtgtaccagcccggcgacggcaacgccgacgtgaccatcaccgtgaacggcaaggtggtggccaagggcggcagcggcggcagcggcggcagcggcggcagcgacatcatcaagctgctgaacgagcaggtgaacaaggagatgaacagcagcaacctgtacatgagcatgagcagctggtgctacacccacagcctggacggcgccggcctgttcctgttcgaccacgccgccgaggagtacgagcacgccaagaagctgatcatcttcctgaacgagaacaacgtgcccgtgcagctgaccagcatcagcgcccccgagcacaagttcgagggcctgacccagatcttccagaaggcctacgagcacgagcagcacatcagcgagagcatcaacaacatcgtggaccacgccatcaagagcaaggaccacgccaccttcaacttcctgcagtggtacgtggccgagcagcacgaggaggaggtgctgttcaaggacatcctggacaagatcgagctgatcggcaacgagaaccacggcctgtacctggccgaccagtacgtgaagggcatcgccaagagcagaaagtgaggactagtccctgttcccagagcccacttttttttctttttttgaaataaaatagcctgtctttcagatctcaaaggctcttttcagagccaccaaaaaaaaaaaaaaaaaaaaaaaaaaaaaaaaaaaaaaaaaaaaaaaaaaaaaaaaaaaaaaaaaaaaaaaaaaaaaaaaaaaaaaaaaaaaaaaaaaaaa

SEQ ID NO: 786 - RNA, 1394 nt, synthetic construct
  misc_feature 1..1394: note Artificial____HsIgE(1-18)_Ec(J96)-FimH(22-300)_Linker-PGDGN _Ec(J96)-FimG(24-37)_TMdomain-HA(510-566) mRNA opt4
  source 1..1394: mol_type = other RNA
aggagagtcccgcagtcggcgtccagcggctctgcttgttcgtgtgtgtgtcgttgcaggccttattcaagcttaccatggactggacctggatcctgttcctggtggccgccgccaccagagtgcacagcttcgcctgcaagaccgccaacggcaccgccatccccatcggcggcggcagcgccaacgtgtacgtgaacctggcccccgtggtgaacgtgggccagaacctggtggtggacctgagcacccagatcttctgccacaacgactaccccgagaccatcaccgactacgtgaccctgcagagaggcagcgcctacggcggcgtgctgagcaacttcagcggcaccgtgaagtacagcggcagcagctaccccttccccaccaccagcgagacccccagagtggtgtacaacagcagaaccgacaagccctggcccgtggccctgtacctgacccccgtgagcagcgccggcggcgtggccatcaaggccggcagcctgatcgccgtgctgatcctgagacagaccaacaactacaacagcgacgacttccagttcgtgtggaacatctacgccaacaacgacgtggtggtgcccaccggcggctgcgacgtgagcgccagagacgtgaccgtgaccctgcccgactaccccggcagcgtgcccatccccctgaccgtgtactgcgccaagagccagaacctgggctactacctgagcggcaccaccgccgacgccggcaacagcatcttcaccaacaccgccagcttcagccccgcccagggcgtgggcgtgcagctgaccagaaacggcaccatcatccccgccaacaacaccgtgagcctgggcgccgtgggcaccagcgccgtgagcctgggcctgaccgccaactacgccagaaccggcggccaggtgaccgccggcaacgtgcagagcatcatcggcgtgaccttcgtgtaccagcccggcgacggcaacgccgacgtgaccatcaccgtgaacggcaaggtggtggccaaggccaagctgaacagagaggagatcgacggcgtgaagctggagagcaccagaatctaccagatcctggccatctacagcaccgtggccagcagcctggtgctggtggtgagcctgggcgccatcagcttctggatgtgcagcaacggcagcctgcagtgcagaatctgcatctgaggactagtccctgttcccagagcccacttttttttctttttttgaaataaaatagcctgtctttcagatctcaaaggctcttttcagagccaccaaaaaaaaaaaaaaaaaaaaaaaaaaaaaaaaaaaaaaaaaaaaaaaaaaaaaaaaaaaaaaaaaaaaaaaaaaaaaaaaaaaaaaaaaaaaaaaaaaaaa

SEQ ID NO: 787 - RNA, 1727 nt, synthetic construct
  misc_feature 1..1727: note Artificial____HsIgE(1-18)_LumSynth(1-154_C37A_N102D)_Linker (GGS)4-GGG_Ec(J96)-FimH(22-300)_Linker-PGDGN_Ec(J96)-FimG(2 4-37) mRNA opt4
  source 1..1727: mol_type = other RNA
aggagagtcccgcagtcggcgtccagcggctctgcttgttcgtgtgtgtgtcgttgcaggccttattcaagcttaccatggactggacctggatcctgttcctggtggccgccgccaccagagtgcacagccagatctacgagggcaagctgaccgccgagggcctgagattcggcatcgtggccagcagattcaaccacgccctggtggacagactggtggagggcgccatcgacgccatcgtgagacacggcggcagagaggaggacatcaccctggtgagagtgcccggcagctgggagatccccgtggccgccggcgagctggccagaaaggaggacatcgacgccgtgatcgccatcggcgtgctgatcagaggcgccaccccccacttcgactacatcgccagcgaggtgagcaagggcctggccgacctgagcctggagctgagaaagcccatcaccttcggcgtgatcaccgccgacaccctggagcaggccatcgagagagccggcaccaagcacggcaacaagggctgggaggccgccctgagcgccatcgagatggccaacctgttcaagagcctgagaggcggcagcggcggcagcggcggcagcggcggcagcggcggcggcttcgcctgcaagaccgccaacggcaccgccatccccatcggcggcggcagcgccaacgtgtacgtgaacctggcccccgtggtgaacgtgggccagaacctggtggtggacctgagcacccagatcttctgccacaacgactaccccgagaccatcaccgactacgtgaccctgcagagaggcagcgcctacggcggcgtgctgagcaacttcagcggcaccgtgaagtacagcggcagcagctaccccttccccaccaccagcgagacccccagagtggtgtacaacagcagaaccgacaagccctggcccgtggccctgtacctgacccccgtgagcagcgccggcggcgtggccatcaaggccggcagcctgatcgccgtgctgatcctgagacagaccaacaactacaacagcgacgacttccagttcgtgtggaacatctacgccaacaacgacgtggtggtgcccaccggcggctgcgacgtgagcgccagagacgtgaccgtgaccctgcccgactaccccggcagcgtgcccatccccctgaccgtgtactgcgccaagagccagaacctgggctactacctgagcggcaccaccgccgacgccggcaacagcatcttcaccaacaccgccagcttcagccccgcccagggcgtgggcgtgcagctgaccagaaacggcaccatcatccccgccaacaacaccgtgagcctgggcgccgtgggcaccagcgccgtgagcctgggcctgaccgccaactacgccagaaccggcggccaggtgaccgccggcaacgtgcagagcatcatcggcgtgaccttcgtgtaccagcccggcgacggcaacgccgacgtgaccatcaccgtgaacggcaaggtggtggccaagtgaggactagtccctgttcccagagcccacttttttttctttttttgaaataaaatagcctgtctttcagatctcaaaggctcttttcagagccaccaaaaaaaaaaaaaaaaaaaaaaaaaaaaaaaaaaaaaaaaaaaaaaaaaaaaaaaaaaaaaaaaaaaaaaaaaaaaaaaaaaaaaaaaaaaaaaaaaaaaa

SEQ ID NO: 788 - RNA, 1694 nt, synthetic construct
  misc_feature 1..1694: note Artificial____HsIgE(1-18)_Ec(J96)-FimH(22-300_N28S_N91S_N24 9Q)_Linker-PGDGN_Ec(J96)-FimG(24-37)_Linker-SGG_LumSynth(1- 154_C37A_N102D) mRNA opt4
  source 1..1694: mol_type = other RNA
aggagagtcccgcagtcggcgtccagcggctctgcttgttcgtgtgtgtgtcgttgcaggccttattcaagcttaccatggactggacctggatcctgttcctggtggccgccgccaccagagtgcacagcttcgcctgcaagaccgccagcggcaccgccatccccatcggcggcggcagcgccaacgtgtacgtgaacctggcccccgtggtgaacgtgggccagaacctggtggtggacctgagcacccagatcttctgccacaacgactaccccgagaccatcaccgactacgtgaccctgcagagaggcagcgcctacggcggcgtgctgagcagcttcagcggcaccgtgaagtacagcggcagcagctaccccttccccaccaccagcgagacccccagagtggtgtacaacagcagaaccgacaagccctggcccgtggccctgtacctgacccccgtgagcagcgccggcggcgtggccatcaaggccggcagcctgatcgccgtgctgatcctgagacagaccaacaactacaacagcgacgacttccagttcgtgtggaacatctacgccaacaacgacgtggtggtgcccaccggcggctgcgacgtgagcgccagagacgtgaccgtgaccctgcccgactaccccggcagcgtgcccatccccctgaccgtgtactgcgccaagagccagaacctgggctactacctgagcggcaccaccgccgacgccggcaacagcatcttcaccaacaccgccagcttcagccccgcccagggcgtgggcgtgcagctgaccagacagggcaccatcatccccgccaacaacaccgtgagcctgggcgccgtgggcaccagcgccgtgagcctgggcctgaccgccaactacgccagaaccggcggccaggtgaccgccggcaacgtgcagagcatcatcggcgtgaccttcgtgtaccagcccggcgacggcaacgccgacgtgaccatcaccgtgaacggcaaggtggtggccaagagcggcggcatgcagatctacgagggcaagctgaccgccgagggcctgagattcggcatcgtggccagcagattcaaccacgccctggtggacagactggtggagggcgccatcgacgccatcgtgagacacggcggcagagaggaggacatcaccctggtgagagtgcccggcagctgggagatccccgtggccgccggcgagctggccagaaaggaggacatcgacgccgtgatcgccatcggcgtgctgatcagaggcgccaccccccacttcgactacatcgccagcgaggtgagcaagggcctggccgacctgagcctggagctgagaaagcccatcaccttcggcgtgatcaccgccgacaccctggagcaggccatcgagagagccggcaccaagcacggcaacaagggctgggaggccgccctgagcgccatcgagatggccaacctgttcaagagcctgagatgaggactagtccctgttcccagagcccacttttttttctttttttgaaataaaatagcctgtctttcagatctcaaaggctcttttcagagccaccaaaaaaaaaaaaaaaaaaaaaaaaaaaaaaaaaaaaaaaaaaaaaaaaaaaaaaaaaaaaaaaaaaaaaaaaaaaaaaaaaaaaaaaaaaaaaaaaaaaaa

SEQ ID NO: 789 - RNA, 1694 nt, synthetic construct
  misc_feature 1..1694: note Artificial____HsIgE(1-18)_Ec(J96)-FimH(22-300_N28S_N91S_N24 9Q_N256D)_Linker-PGDGN_Ec(J96)-FimG(24-37)_Linker-SGG_LumSy nth(1-154_C37A_N102D) mRNA opt4
  source 1..1694: mol_type = other RNA
aggagagtcccgcagtcggcgtccagcggctctgcttgttcgtgtgtgtgtcgttgcaggccttattcaagcttaccatggactggacctggatcctgttcctggtggccgccgccaccagagtgcacagcttcgcctgcaagaccgccagcggcaccgccatccccatcggcggcggcagcgccaacgtgtacgtgaacctggcccccgtggtgaacgtgggccagaacctggtggtggacctgagcacccagatcttctgccacaacgactaccccgagaccatcaccgactacgtgaccctgcagagaggcagcgcctacggcggcgtgctgagcagcttcagcggcaccgtgaagtacagcggcagcagctaccccttccccaccaccagcgagacccccagagtggtgtacaacagcagaaccgacaagccctggcccgtggccctgtacctgacccccgtgagcagcgccggcggcgtggccatcaaggccggcagcctgatcgccgtgctgatcctgagacagaccaacaactacaacagcgacgacttccagttcgtgtggaacatctacgccaacaacgacgtggtggtgcccaccggcggctgcgacgtgagcgccagagacgtgaccgtgaccctgcccgactaccccggcagcgtgcccatccccctgaccgtgtactgcgccaagagccagaacctgggctactacctgagcggcaccaccgccgacgccggcaacagcatcttcaccaacaccgccagcttcagccccgcccagggcgtgggcgtgcagctgaccagacagggcaccatcatccccgccgacaacaccgtgagcctgggcgccgtgggcaccagcgccgtgagcctgggcctgaccgccaactacgccagaaccggcggccaggtgaccgccggcaacgtgcagagcatcatcggcgtgaccttcgtgtaccagcccggcgacggcaacgccgacgtgaccatcaccgtgaacggcaaggtggtggccaagagcggcggcatgcagatctacgagggcaagctgaccgccgagggcctgagattcggcatcgtggccagcagattcaaccacgccctggtggacagactggtggagggcgccatcgacgccatcgtgagacacggcggcagagaggaggacatcaccctggtgagagtgcccggcagctgggagatccccgtggccgccggcgagctggccagaaaggaggacatcgacgccgtgatcgccatcggcgtgctgatcagaggcgccaccccccacttcgactacatcgccagcgaggtgagcaagggcctggccgacctgagcctggagctgagaaagcccatcaccttcggcgtgatcaccgccgacaccctggagcaggccatcgagagagccggcaccaagcacggcaacaagggctgggaggccgccctgagcgccatcgagatggccaacctgttcaagagcctgagatgaggactagtccctgttcccagagcccacttttttttctttttttgaaataaaatagcctgtctttcagatctcaaaggctcttttcagagccaccaaaaaaaaaaaaaaaaaaaaaaaaaaaaaaaaaaaaaaaaaaaaaaaaaaaaaaaaaaaaaaaaaaaaaaaaaaaaaaaaaaaaaaaaaaaaaaaaaaaaa

SEQ ID NO: 790 - RNA, 1694 nt, synthetic construct
  misc_feature 1..1694: note Artificial____HsIgE(1-18)_Ec(J96)-FimH(22-300_N28S_V48C_L55 C_N91S_N249Q)_Linker-PGDGN_Ec(J96)-FimG(24-37)_Linker-SGG_L umSynth(1-154_C37A_N102D) mRNA opt4
  source 1..1694: mol_type = other RNA
aggagagtcccgcagtcggcgtccagcggctctgcttgttcgtgtgtgtgtcgttgcaggccttattcaagcttaccatggactggacctggatcctgttcctggtggccgccgccaccagagtgcacagcttcgcctgcaagaccgccagcggcaccgccatccccatcggcggcggcagcgccaacgtgtacgtgaacctggccccctgcgtgaacgtgggccagaactgcgtggtggacctgagcacccagatcttctgccacaacgactaccccgagaccatcaccgactacgtgaccctgcagagaggcagcgcctacggcggcgtgctgagcagcttcagcggcaccgtgaagtacagcggcagcagctaccccttccccaccaccagcgagacccccagagtggtgtacaacagcagaaccgacaagccctggcccgtggccctgtacctgacccccgtgagcagcgccggcggcgtggccatcaaggccggcagcctgatcgccgtgctgatcctgagacagaccaacaactacaacagcgacgacttccagttcgtgtggaacatctacgccaacaacgacgtggtggtgcccaccggcggctgcgacgtgagcgccagagacgtgaccgtgaccctgcccgactaccccggcagcgtgcccatccccctgaccgtgtactgcgccaagagccagaacctgggctactacctgagcggcaccaccgccgacgccggcaacagcatcttcaccaacaccgccagcttcagccccgcccagggcgtgggcgtgcagctgaccagacagggcaccatcatccccgccaacaacaccgtgagcctgggcgccgtgggcaccagcgccgtgagcctgggcctgaccgccaactacgccagaaccggcggccaggtgaccgccggcaacgtgcagagcatcatcggcgtgaccttcgtgtaccagcccggcgacggcaacgccgacgtgaccatcaccgtgaacggcaaggtggtggccaagagcggcggcatgcagatctacgagggcaagctgaccgccgagggcctgagattcggcatcgtggccagcagattcaaccacgccctggtggacagactggtggagggcgccatcgacgccatcgtgagacacggcggcagagaggaggacatcaccctggtgagagtgcccggcagctgggagatccccgtggccgccggcgagctggccagaaaggaggacatcgacgccgtgatcgccatcggcgtgctgatcagaggcgccaccccccacttcgactacatcgccagcgaggtgagcaagggcctggccgacctgagcctggagctgagaaagcccatcaccttcggcgtgatcaccgccgacaccctggagcaggccatcgagagagccggcaccaagcacggcaacaagggctgggaggccgccctgagcgccatcgagatggccaacctgttcaagagcctgagatgaggactagtccctgttcccagagcccacttttttttctttttttgaaataaaatagcctgtctttcagatctcaaaggctcttttcagagccaccaaaaaaaaaaaaaaaaaaaaaaaaaaaaaaaaaaaaaaaaaaaaaaaaaaaaaaaaaaaaaaaaaaaaaaaaaaaaaaaaaaaaaaaaaaaaaaaaaaaaa

SEQ ID NO: 791 - RNA, 1694 nt, synthetic construct
  misc_feature 1..1694: note Artificial____HsIgE(1-18)_Ec(J96)-FimH(22-300_F165V)_Linker -PGDGN_Ec(J96)-FimG(24-37)_Linker-SGG_LumSynth(1-154_C37A_N 102D) mRNA opt4
  source 1..1694: mol_type = other RNA
aggagagtcccgcagtcggcgtccagcggctctgcttgttcgtgtgtgtgtcgttgcaggccttattcaagcttaccatggactggacctggatcctgttcctggtggccgccgccaccagagtgcacagcttcgcctgcaagaccgccaacggcaccgccatccccatcggcggcggcagcgccaacgtgtacgtgaacctggcccccgtggtgaacgtgggccagaacctggtggtggacctgagcacccagatcttctgccacaacgactaccccgagaccatcaccgactacgtgaccctgcagagaggcagcgcctacggcggcgtgctgagcaacttcagcggcaccgtgaagtacagcggcagcagctaccccttccccaccaccagcgagacccccagagtggtgtacaacagcagaaccgacaagccctggcccgtggccctgtacctgacccccgtgagcagcgccggcggcgtggccatcaaggccggcagcctgatcgccgtgctgatcctgagacagaccaacaactacaacagcgacgacttccaggtggtgtggaacatctacgccaacaacgacgtggtggtgcccaccggcggctgcgacgtgagcgccagagacgtgaccgtgaccctgcccgactaccccggcagcgtgcccatccccctgaccgtgtactgcgccaagagccagaacctgggctactacctgagcggcaccaccgccgacgccggcaacagcatcttcaccaacaccgccagcttcagccccgcccagggcgtgggcgtgcagctgaccagaaacggcaccatcatccccgccaacaacaccgtgagcctgggcgccgtgggcaccagcgccgtgagcctgggcctgaccgccaactacgccagaaccggcggccaggtgaccgccggcaacgtgcagagcatcatcggcgtgaccttcgtgtaccagcccggcgacggcaacgccgacgtgaccatcaccgtgaacggcaaggtggtggccaagagcggcggcatgcagatctacgagggcaagctgaccgccgagggcctgagattcggcatcgtggccagcagattcaaccacgccctggtggacagactggtggagggcgccatcgacgccatcgtgagacacggcggcagagaggaggacatcaccctggtgagagtgcccggcagctgggagatccccgtggccgccggcgagctggccagaaaggaggacatcgacgccgtgatcgccatcggcgtgctgatcagaggcgccaccccccacttcgactacatcgccagcgaggtgagcaagggcctggccgacctgagcctggagctgagaaagcccatcaccttcggcgtgatcaccgccgacaccctggagcaggccatcgagagagccggcaccaagcacggcaacaagggctgggaggccgccctgagcgccatcgagatggccaacctgttcaagagcctgagatgaggactagtccctgttcccagagcccacttttttttctttttttgaaataaaatagcctgtctttcagatctcaaaggctcttttcagagccaccaaaaaaaaaaaaaaaaaaaaaaaaaaaaaaaaaaaaaaaaaaaaaaaaaaaaaaaaaaaaaaaaaaaaaaaaaaaaaaaaaaaaaaaaaaaaaaaaaaaaa

SEQ ID NO: 792 - RNA, 1721 nt, synthetic construct
  misc_feature 1..1721: note Artificial____HsIgE(1-18)_Ec(J96)-FimH(22-300_N28S_N91S_N24 9Q)_Linker-PGDGN_Ec(J96)-FimG(24-37)_Linker-SGG_Ferritin(5- 167_N19Q) mRNA opt4
  source 1..1721: mol_type = other RNA
aggagagtcccgcagtcggcgtccagcggctctgcttgttcgtgtgtgtgtcgttgcaggccttattcaagcttaccatggactggacctggatcctgttcctggtggccgccgccaccagagtgcacagcttcgcctgcaagaccgccagcggcaccgccatccccatcggcggcggcagcgccaacgtgtacgtgaacctggcccccgtggtgaacgtgggccagaacctggtggtggacctgagcacccagatcttctgccacaacgactaccccgagaccatcaccgactacgtgaccctgcagagaggcagcgcctacggcggcgtgctgagcagcttcagcggcaccgtgaagtacagcggcagcagctaccccttccccaccaccagcgagacccccagagtggtgtacaacagcagaaccgacaagccctggcccgtggccctgtacctgacccccgtgagcagcgccggcggcgtggccatcaaggccggcagcctgatcgccgtgctgatcctgagacagaccaacaactacaacagcgacgacttccagttcgtgtggaacatctacgccaacaacgacgtggtggtgcccaccggcggctgcgacgtgagcgccagagacgtgaccgtgaccctgcccgactaccccggcagcgtgcccatccccctgaccgtgtactgcgccaagagccagaacctgggctactacctgagcggcaccaccgccgacgccggcaacagcatcttcaccaacaccgccagcttcagccccgcccagggcgtgggcgtgcagctgaccagacagggcaccatcatccccgccaacaacaccgtgagcctgggcgccgtgggcaccagcgccgtgagcctgggcctgaccgccaactacgccagaaccggcggccaggtgaccgccggcaacgtgcagagcatcatcggcgtgaccttcgtgtaccagcccggcgacggcaacgccgacgtgaccatcaccgtgaacggcaaggtggtggccaagagcggcggcgacatcatcaagctgctgaacgagcaggtgaacaaggagatgcagagcagcaacctgtacatgagcatgagcagctggtgctacacccacagcctggacggcgccggcctgttcctgttcgaccacgccgccgaggagtacgagcacgccaagaagctgatcatcttcctgaacgagaacaacgtgcccgtgcagctgaccagcatcagcgcccccgagcacaagttcgagggcctgacccagatcttccagaaggcctacgagcacgagcagcacatcagcgagagcatcaacaacatcgtggaccacgccatcaagagcaaggaccacgccaccttcaacttcctgcagtggtacgtggccgagcagcacgaggaggaggtgctgttcaaggacatcctggacaagatcgagctgatcggcaacgagaaccacggcctgtacctggccgaccagtacgtgaagggcatcgccaagagcagaaagagctgaggactagtccctgttcccagagcccacttttttttctttttttgaaataaaatagcctgtctttcagatctcaaaggctcttttcagagccaccaaaaaaaaaaaaaaaaaaaaaaaaaaaaaaaaaaaaaaaaaaaaaaaaaaaaaaaaaaaaaaaaaaaaaaaaaaaaaaaaaaaaaaaaaaaaaaaaaaaaa

SEQ ID NO: 793 - RNA, 1721 nt, synthetic construct
  misc_feature 1..1721: note Artificial____HsIgE(1-18)_Ec(J96)-FimH(22-300_N28S_N91S_N24 9Q_N256D)_Linker-PGDGN_Ec(J96)-FimG(24-37)_Linker-SGG_Ferri tin(5-167_N19Q) mRNA opt4
  source 1..1721: mol_type = other RNA
aggagagtcccgcagtcggcgtccagcggctctgcttgttcgtgtgtgtgtcgttgcaggccttattcaagcttaccatggactggacctggatcctgttcctggtggccgccgccaccagagtgcacagcttcgcctgcaagaccgccagcggcaccgccatccccatcggcggcggcagcgccaacgtgtacgtgaacctggcccccgtggtgaacgtgggccagaacctggtggtggacctgagcacccagatcttctgccacaacgactaccccgagaccatcaccgactacgtgaccctgcagagaggcagcgcctacggcggcgtgctgagcagcttcagcggcaccgtgaagtacagcggcagcagctaccccttccccaccaccagcgagacccccagagtggtgtacaacagcagaaccgacaagccctggcccgtggccctgtacctgacccccgtgagcagcgccggcggcgtggccatcaaggccggcagcctgatcgccgtgctgatcctgagacagaccaacaactacaacagcgacgacttccagttcgtgtggaacatctacgccaacaacgacgtggtggtgcccaccggcggctgcgacgtgagcgccagagacgtgaccgtgaccctgcccgactaccccggcagcgtgcccatccccctgaccgtgtactgcgccaagagccagaacctgggctactacctgagcggcaccaccgccgacgccggcaacagcatcttcaccaacaccgccagcttcagccccgcccagggcgtgggcgtgcagctgaccagacagggcaccatcatccccgccgacaacaccgtgagcctgggcgccgtgggcaccagcgccgtgagcctgggcctgaccgccaactacgccagaaccggcggccaggtgaccgccggcaacgtgcagagcatcatcggcgtgaccttcgtgtaccagcccggcgacggcaacgccgacgtgaccatcaccgtgaacggcaaggtggtggccaagagcggcggcgacatcatcaagctgctgaacgagcaggtgaacaaggagatgcagagcagcaacctgtacatgagcatgagcagctggtgctacacccacagcctggacggcgccggcctgttcctgttcgaccacgccgccgaggagtacgagcacgccaagaagctgatcatcttcctgaacgagaacaacgtgcccgtgcagctgaccagcatcagcgcccccgagcacaagttcgagggcctgacccagatcttccagaaggcctacgagcacgagcagcacatcagcgagagcatcaacaacatcgtggaccacgccatcaagagcaaggaccacgccaccttcaacttcctgcagtggtacgtggccgagcagcacgaggaggaggtgctgttcaaggacatcctggacaagatcgagctgatcggcaacgagaaccacggcctgtacctggccgaccagtacgtgaagggcatcgccaagagcagaaagagctgaggactagtccctgttcccagagcccacttttttttctttttttgaaataaaatagcctgtctttcagatctcaaaggctcttttcagagccaccaaaaaaaaaaaaaaaaaaaaaaaaaaaaaaaaaaaaaaaaaaaaaaaaaaaaaaaaaaaaaaaaaaaaaaaaaaaaaaaaaaaaaaaaaaaaaaaaaaaaa

SEQ ID NO: 794 - RNA, 1721 nt, synthetic construct
  misc_feature 1..1721: note Artificial____HsIgE(1-18)_Ec(J96)-FimH(22-300_N28S_V48C_L55 C_N91S_N249Q)_Linker-PGDGN_Ec(J96)-FimG(24-37)_Linker-SGG_F erritin(5-167_N19Q) mRNA opt4
  source 1..1721: mol_type = other RNA
aggagagtcccgcagtcggcgtccagcggctctgcttgttcgtgtgtgtgtcgttgcaggccttattcaagcttaccatggactggacctggatcctgttcctggtggccgccgccaccagagtgcacagcttcgcctgcaagaccgccagcggcaccgccatccccatcggcggcggcagcgccaacgtgtacgtgaacctggccccctgcgtgaacgtgggccagaactgcgtggtggacctgagcacccagatcttctgccacaacgactaccccgagaccatcaccgactacgtgaccctgcagagaggcagcgcctacggcggcgtgctgagcagcttcagcggcaccgtgaagtacagcggcagcagctaccccttccccaccaccagcgagacccccagagtggtgtacaacagcagaaccgacaagccctggcccgtggccctgtacctgacccccgtgagcagcgccggcggcgtggccatcaaggccggcagcctgatcgccgtgctgatcctgagacagaccaacaactacaacagcgacgacttccagttcgtgtggaacatctacgccaacaacgacgtggtggtgcccaccggcggctgcgacgtgagcgccagagacgtgaccgtgaccctgcccgactaccccggcagcgtgcccatccccctgaccgtgtactgcgccaagagccagaacctgggctactacctgagcggcaccaccgccgacgccggcaacagcatcttcaccaacaccgccagcttcagccccgcccagggcgtgggcgtgcagctgaccagacagggcaccatcatccccgccaacaacaccgtgagcctgggcgccgtgggcaccagcgccgtgagcctgggcctgaccgccaactacgccagaaccggcggccaggtgaccgccggcaacgtgcagagcatcatcggcgtgaccttcgtgtaccagcccggcgacggcaacgccgacgtgaccatcaccgtgaacggcaaggtggtggccaagagcggcggcgacatcatcaagctgctgaacgagcaggtgaacaaggagatgcagagcagcaacctgtacatgagcatgagcagctggtgctacacccacagcctggacggcgccggcctgttcctgttcgaccacgccgccgaggagtacgagcacgccaagaagctgatcatcttcctgaacgagaacaacgtgcccgtgcagctgaccagcatcagcgcccccgagcacaagttcgagggcctgacccagatcttccagaaggcctacgagcacgagcagcacatcagcgagagcatcaacaacatcgtggaccacgccatcaagagcaaggaccacgccaccttcaacttcctgcagtggtacgtggccgagcagcacgaggaggaggtgctgttcaaggacatcctggacaagatcgagctgatcggcaacgagaaccacggcctgtacctggccgaccagtacgtgaagggcatcgccaagagcagaaagagctgaggactagtccctgttcccagagcccacttttttttctttttttgaaataaaatagcctgtctttcagatctcaaaggctcttttcagagccaccaaaaaaaaaaaaaaaaaaaaaaaaaaaaaaaaaaaaaaaaaaaaaaaaaaaaaaaaaaaaaaaaaaaaaaaaaaaaaaaaaaaaaaaaaaaaaaaaaaaaa

SEQ ID NO: 795 - RNA, 1721 nt, synthetic construct
  misc_feature 1..1721: note Artificial____HsIgE(1-18)_Ec(J96)-FimH(22-300_F165V)_Linker -PGDGN_Ec(J96)-FimG(24-37)_Linker-SGG_Ferritin(5-167_N19Q) mRNA opt4
  source 1..1721: mol_type = other RNA
aggagagtcccgcagtcggcgtccagcggctctgcttgttcgtgtgtgtgtcgttgcaggccttattcaagcttaccatggactggacctggatcctgttcctggtggccgccgccaccagagtgcacagcttcgcctgcaagaccgccaacggcaccgccatccccatcggcggcggcagcgccaacgtgtacgtgaacctggcccccgtggtgaacgtgggccagaacctggtggtggacctgagcacccagatcttctgccacaacgactaccccgagaccatcaccgactacgtgaccctgcagagaggcagcgcctacggcggcgtgctgagcaacttcagcggcaccgtgaagtacagcggcagcagctaccccttccccaccaccagcgagacccccagagtggtgtacaacagcagaaccgacaagccctggcccgtggccctgtacctgacccccgtgagcagcgccggcggcgtggccatcaaggccggcagcctgatcgccgtgctgatcctgagacagaccaacaactacaacagcgacgacttccaggtggtgtggaacatctacgccaacaacgacgtggtggtgcccaccggcggctgcgacgtgagcgccagagacgtgaccgtgaccctgcccgactaccccggcagcgtgcccatccccctgaccgtgtactgcgccaagagccagaacctgggctactacctgagcggcaccaccgccgacgccggcaacagcatcttcaccaacaccgccagcttcagccccgcccagggcgtgggcgtgcagctgaccagaaacggcaccatcatccccgccaacaacaccgtgagcctgggcgccgtgggcaccagcgccgtgagcctgggcctgaccgccaactacgccagaaccggcggccaggtgaccgccggcaacgtgcagagcatcatcggcgtgaccttcgtgtaccagcccggcgacggcaacgccgacgtgaccatcaccgtgaacggcaaggtggtggccaagagcggcggcgacatcatcaagctgctgaacgagcaggtgaacaaggagatgcagagcagcaacctgtacatgagcatgagcagctggtgctacacccacagcctggacggcgccggcctgttcctgttcgaccacgccgccgaggagtacgagcacgccaagaagctgatcatcttcctgaacgagaacaacgtgcccgtgcagctgaccagcatcagcgcccccgagcacaagttcgagggcctgacccagatcttccagaaggcctacgagcacgagcagcacatcagcgagagcatcaacaacatcgtggaccacgccatcaagagcaaggaccacgccaccttcaacttcctgcagtggtacgtggccgagcagcacgaggaggaggtgctgttcaaggacatcctggacaagatcgagctgatcggcaacgagaaccacggcctgtacctggccgaccagtacgtgaagggcatcgccaagagcagaaagagctgaggactagtccctgttcccagagcccacttttttttctttttttgaaataaaatagcctgtctttcagatctcaaaggctcttttcagagccaccaaaaaaaaaaaaaaaaaaaaaaaaaaaaaaaaaaaaaaaaaaaaaaaaaaaaaaaaaaaaaaaaaaaaaaaaaaaaaaaaaaaaaaaaaaaaaaaaaaaaa

SEQ ID NO: 796 - RNA, 998 nt, synthetic construct
  misc_feature 1..998: note Artificial____Ec(J96)-FimC(1-36)_Ec(J96)-FimC(37-241) mRNA opt5
  source 1..998: mol_type = other RNA
aggagagtcccgcagtcggcgtccagcggctctgcttgttcgtgtgtgtgtcgttgcaggccttattcaagcttaccatgagcaacaagaatgtgaacgtcagaaaatcccaggagatcaccttctgcctgctcgccggcattctgatgtttatggctatgatggttgccgggcgggcggaagctggagtggcccttggcgccacacgcgtgatctaccccgctgggcaaaagcaggtccagctggccgtgacgaataacgacgaaaattctacctatctcattcagagctgggttgagaacgctgatggagtgaaagacggcagattcatcgtcacacctccgctgtttgccatgaaggggaaaaaggagaatacccttcggattctggatgcgacaaacaatcaactcccccaggaccgcgaatccctgttctggatgaacgtgaaggccatcccttctatggataaaagcaagctgaccgagaatacactccagctggctatcatttccagaatcaaactttactatcggcccgccaagctggctctccctcccgaccaggccgcggagaaactgcgctttagacggtctgccaacagccttaccctgattaatcctacgccgtactatctcaccgttacagaactgaacgctggaacccgcgtgctggagaatgccctcgtgccccctatgggcgaatccacagtcaagctgcccagcgatgctggctctaacatcacctacagaacgattaacgactatggggcccttacacctaagatgaccggagtgatggagtgaggactagtccctgttcccagagcccacttttttttctttttttgaaataaaatagcctgtctttcagatctcaaaggctcttttcagagccaccaaaaaaaaaaaaaaaaaaaaaaaaaaaaaaaaaaaaaaaaaaaaaaaaaaaaaaaaaaaaaaaaaaaaaaaaaaaaaaaaaaaaaaaaaaaaaaaaaaaaa

SEQ ID NO: 797 - RNA, 944 nt, synthetic construct
  misc_feature 1..944: note = Artificial____HsIgE(1-18)_Ec(J96)-FimC(37-241) mRNA opt5
  source 1..944: mol_type = other RNA
aggagagtcccgcagtcggcgtccagcggctctgcttgttcgtgtgtgtgtcgttgcaggccttattcaagcttaccatggactggacctggatcctgttcctcgtggccgctgccacaagagtccacagcggcgttgcgctgggggctacgcgggtgatttaccccgccggacagaagcaagtgcagcttgccgtcaccaacaatgatgagaactccacatatctgatccagtcttgggtggaaaatgctgacggcgttaaagatgggcgctttattgtgacccctcccctcttcgccatgaagggaaagaaggagaacacactgagaatccttgacgctaccaataaccagctgccgcaagatcgggaaagcctcttttggatgaatgtcaaagccattccttccatggacaagtctaagctgacagagaacaccctgcagctcgcgatcatcagccgcattaaactgtactatagacccgccaaacttgctctgcctcccgatcaggccgctgaaaaactccggttccgcagatccgccaattctctgacgcttatcaaccctaccccgtactatctgacagtgaccgagctcaatgcgggcacacgggttctggagaacgccctggtgccccctatgggggaaagcaccgtcaagctcccctccgacgctggaagcaatattacgtaccgcacaatcaacgattatggcgccctgacccctaaaatgacaggcgtgatggagtgaggactagtccctgttcccagagcccacttttttttctttttttgaaataaaatagcctgtctttcagatctcaaaggctcttttcagagccaccaaaaaaaaaaaaaaaaaaaaaaaaaaaaaaaaaaaaaaaaaaaaaaaaaaaaaaaaaaaaaaaaaaaaaaaaaaaaaaaaaaaaaaaaaaaaaaaaaaaaa

SEQ ID NO: 798 - RNA, 1175 nt, synthetic construct
  misc_feature 1..1175: note Artificial____Ec(J96)-FimH(1-21)_Ec(J96)-FimH(22-300) mRNA opt5
  source 1..1175: mol_type = other RNA
aggagagtcccgcagtcggcgtccagcggctctgcttgttcgtgtgtgtgtcgttgcaggccttattcaagcttaccatgaagagagtgatcaccctgttcgccgtcctcctgatgggctggagcgttaacgcttggtcctttgcctgcaaaacagcgaatgggacggctattcccatcggaggcgggtctgccaacgtgtacgtgaatcttgcccctgtcgtgaacgttggacagaatctggtggtcgacctcagcacccaaattttctgtcacaacgattatccggagacaatcaccgactacgtgacactgcagcggggctccgcttatgggggagttctttctaattttagcggcaccgtgaagtactccggctctagctatcccttccctacaacctccgaaacgccccgcgtcgtgtacaacagcagaaccgataaaccttggcccgtggccctgtatctcacacctgtctcttccgctgggggagttgccattaaggcgggcagcctgatcgccgtgctgatcctccggcagaccaataactacaattctgacgattttcagttcgtgtggaacatttacgctaataacgacgtcgtggttccgacagggggatgcgatgtgtccgcccgcgacgtcaccgtgacgctgcccgattatcctggcagcgttcccatccctcttacagtgtactgtgctaaatctcaaaatctggggtattacctctccggaaccacagccgacgcgggcaacagcatttttaccaacaccgcctccttctctcccgctcagggcgtcggggtgcagctgacaagaaatggaacgatcattccggccaacaataccgtcagccttggcgctgtggggacatccgccgttagcctgggactcaccgccaactatgctcggacaggcggacaggtgaccgcggggaatgtccaatctatcattggcgtgacgtttgtttaccagtgaggactagtccctgttcccagagcccacttttttttctttttttgaaataaaatagcctgtctttcagatctcaaaggctcttttcagagccaccaaaaaaaaaaaaaaaaaaaaaaaaaaaaaaaaaaaaaaaaaaaaaaaaaaaaaaaaaaaaaaaaaaaaaaaaaaaaaaaaaaaaaaaaaaaaaaaaaaaaa

SEQ ID NO: 799 - RNA, 1166 nt, synthetic construct
  misc_feature 1..1166: note = Artificial____HsIgE(1-18)_Ec(J96)-FimH(22-300) mRNA opt5
  source 1..1166: mol_type = other RNA
aggagagtcccgcagtcggcgtccagcggctctgcttgttcgtgtgtgtgtcgttgcaggccttattcaagcttaccatggactggacctggatcctgttcctcgtggccgctgccacaagagtccacagctttgcgtgcaagacggctaacggcaccgccattcccatcgggggaggctccgccaatgtttacgtgaacctggctcctgtggtcaatgtggggcagaaccttgttgtggatctgtctacacaaattttctgtcataatgactatccggagaccatcacagattacgtcaccctccagcggggaagcgcctatggcggggtgctgtccaacttttctggaacagttaaatacagcggctcctcttatcccttccctaccacgagcgaaacaccccgcgtggtctacaattccagaaccgacaagccttggcccgtggctctttatctgacccctgtgagctctgccggcggggtcgcgattaaagccggatccctcatcgctgttctgatcctgcggcagacaaacaattacaacagcgatgactttcagttcgtgtggaatatttacgccaacaatgatgtggtcgtgccgaccggcgggtgcgacgtttctgctcgcgatgtgacggtcacactccccgactatcctggatccgtgcccatccctctgaccgtttactgtgccaagagccaaaaccttggctattacctgtctgggacaaccgcggatgccggaaattccatttttaccaacacagctagcttctcccccgcccagggcgtgggcgtccagctcacgagaaacgggaccatcattccggctaataacacagtgtctctgggagccgtcggcaccagcgccgtgtcccttgggctgacagctaattatgcgcggaccggaggccaggttacggccgggaacgtgcaaagcatcattggagtcacatttgtgtaccagtgaggactagtccctgttcccagagcccacttttttttctttttttgaaataaaatagcctgtctttcagatctcaaaggctcttttcagagccaccaaaaaaaaaaaaaaaaaaaaaaaaaaaaaaaaaaaaaaaaaaaaaaaaaaaaaaaaaaaaaaaaaaaaaaaaaaaaaaaaaaaaaaaaaaaaaaaaaaaaa

SEQ ID NO: 800 - RNA, 1172 nt, synthetic construct
  misc_feature 1..1172: note = Artificial____MmIgK(1-20)_Ec(J96)-FimH(22-300) mRNA opt5
  source 1..1172: mol_type = other RNA
aggagagtcccgcagtcggcgtccagcggctctgcttgttcgtgtgtgtgtcgttgcaggccttattcaagcttaccatggagaccgacacactgctcctgtgggtgcttctgctctgggtccccggcagcacggggttcgcctgcaagaccgctaacggaacagccatccctattggcgggggatccgcgaatgtttacgtgaacctggctccggtggtcaatgtgggccagaaccttgttgtggatctgtctacccaaatcttttgtcacaatgactatcccgaaacaattaccgattacgtcacactccagagagggagcgcctatggaggcgtgctgtccaacttctctggcaccgttaaatacagcgggtcctcttatccttttcccacgaccagcgagacacctcgggtggtctacaattcccgcaccgacaagccctggcctgtggccctgtatctcacaccggtgagctctgctggaggcgtcgccatcaaagctgggtccctgattgccgttcttatcctgagacagaccaacaattacaacagcgatgacttccagtttgtgtggaatatctacgcgaacaatgatgtggtcgtgcccacgggaggctgcgacgtttctgcccgggatgtgacagtcaccctccctgactatcccgggtccgtgcctattcccctgacagtttactgtgctaagagccaaaaccttggatattacctgtctggcaccaccgccgatgctggcaattccatcttcacaaacacggccagcttttccccggcgcagggggtgggagtccagctcacccgcaacggcacaattatccctgccaataacaccgtgtctctgggggctgtcggaacaagcgccgtgtccctgggcctcaccgctaattatgccagaacagggggacaggttacggccggcaacgtgcaaagcattatcggcgtcaccttcgtgtaccagtgaggactagtccctgttcccagagcccacttttttttctttttttgaaataaaatagcctgtctttcagatctcaaaggctcttttcagagccaccaaaaaaaaaaaaaaaaaaaaaaaaaaaaaaaaaaaaaaaaaaaaaaaaaaaaaaaaaaaaaaaaaaaaaaaaaaaaaaaaaaaaaaaaaaaaaaaaaaaaa

SEQ ID NO: 801 - RNA, 1232 nt, synthetic construct
  misc_feature 1..1232: note Artificial____Ec(J96)-FimH(1-21)_Ec(J96)-FimH(22-300)_Linke r-PGDGN_Ec(J96)-FimG(24-37) mRNA opt5
  source 1..1232: mol_type = other RNA
aggagagtcccgcagtcggcgtccagcggctctgcttgttcgtgtgtgtgtcgttgcaggccttattcaagcttaccatgaagagagtgatcaccctgttcgccgtcctcctgatgggctggagcgttaacgcttggtcctttgcctgcaaaacagcgaatgggacggctattcccatcggaggcgggtctgccaacgtgtacgtgaatcttgcccctgtcgtgaacgttggacagaatctggtggtcgacctcagcacccaaattttctgtcacaacgattatccggagacaatcaccgactacgtgacactgcagcggggctccgcttatgggggagttctttctaattttagcggcaccgtgaagtactccggctctagctatcccttccctacaacctccgaaacgccccgcgtcgtgtacaacagcagaaccgataaaccttggcccgtggccctgtatctcacacctgtctcttccgctgggggagttgccattaaggcgggcagcctgatcgccgtgctgatcctccggcagaccaataactacaattctgacgattttcagttcgtgtggaacatttacgctaataacgacgtcgtggttccgacagggggatgcgatgtgtccgcccgcgacgtcaccgtgacgctgcccgattatcctggcagcgttcccatccctcttacagtgtactgtgctaaatctcaaaatctggggtattacctctccggaaccacagccgacgcgggcaacagcatttttaccaacaccgcctccttctctcccgctcagggcgtcggggtgcagctgacaagaaatggaacgatcattccggccaacaataccgtcagccttggcgctgtggggacatccgccgttagcctgggactcaccgccaactatgctcggacaggcggacaggtgaccgcggggaatgtccaatctatcattggcgtgacgtttgtttaccagcctggcgatgggaacgccgacgtgacaatcaccgtcaatggaaaggtggtggctaagtgaggactagtccctgttcccagagcccacttttttttctttttttgaaataaaatagcctgtctttcagatctcaaaggctcttttcagagccaccaaaaaaaaaaaaaaaaaaaaaaaaaaaaaaaaaaaaaaaaaaaaaaaaaaaaaaaaaaaaaaaaaaaaaaaaaaaaaaaaaaaaaaaaaaaaaaaaaaaaa

SEQ ID NO: 802 - RNA, 1223 nt, synthetic construct
  misc_feature 1..1223: note Artificial____HsIgE(1-18)_Ec(J96)-FimH(22-300)_Linker-PGDGN _Ec(J96)-FimG(24-37) mRNA opt5
  source 1..1223: mol_type = other RNA
aggagagtcccgcagtcggcgtccagcggctctgcttgttcgtgtgtgtgtcgttgcaggccttattcaagcttaccatggactggacctggatcctgttcctcgtggccgctgccacaagagtccacagctttgcgtgcaagacggctaacggcaccgccattcccatcgggggaggctccgccaatgtttacgtgaacctggctcctgtggtcaatgtggggcagaaccttgttgtggatctgtctacacaaattttctgtcataatgactatccggagaccatcacagattacgtcaccctccagcggggaagcgcctatggcggggtgctgtccaacttttctggaacagttaaatacagcggctcctcttatcccttccctaccacgagcgaaacaccccgcgtggtctacaattccagaaccgacaagccttggcccgtggctctttatctgacccctgtgagctctgccggcggggtcgcgattaaagccggatccctcatcgctgttctgatcctgcggcagacaaacaattacaacagcgatgactttcagttcgtgtggaatatttacgccaacaatgatgtggtcgtgccgaccggcgggtgcgacgtttctgctcgcgatgtgacggtcacactccccgactatcctggatccgtgcccatccctctgaccgtttactgtgccaagagccaaaaccttggctattacctgtctgggacaaccgcggatgccggaaattccatttttaccaacacagctagcttctcccccgcccagggcgtgggcgtccagctcacgagaaacgggaccatcattccggctaataacacagtgtctctgggagccgtcggcaccagcgccgtgtcccttgggctgacagctaattatgcgcggaccggaggccaggttacggccgggaacgtgcaaagcatcattggagtcacatttgtgtaccagcctggcgacggcaatgctgatgttaccatcaccgtgaacgggaaagtcgtggccaagtgaggactagtccctgttcccagagcccacttttttttctttttttgaaataaaatagcctgtctttcagatctcaaaggctcttttcagagccaccaaaaaaaaaaaaaaaaaaaaaaaaaaaaaaaaaaaaaaaaaaaaaaaaaaaaaaaaaaaaaaaaaaaaaaaaaaaaaaaaaaaaaaaaaaaaaaaaaaaaa

SEQ ID NO: 803 - RNA, 1229 nt, synthetic construct
  misc_feature 1..1229: note Artificial____HsIgE(1-18)_Ec(J96)-FimH(22-300)_Linker-G4SGG _Ec(J96)-FimG(24-37) mRNA opt5
  source 1..1229: mol_type = other RNA
aggagagtcccgcagtcggcgtccagcggctctgcttgttcgtgtgtgtgtcgttgcaggccttattcaagcttaccatggactggacctggatcctgttcctcgtggccgctgccacaagagtccacagctttgcgtgcaagacggctaacggcaccgccattcccatcgggggaggctccgccaatgtttacgtgaacctggctcctgtggtcaatgtggggcagaaccttgttgtggatctgtctacacaaattttctgtcataatgactatccggagaccatcacagattacgtcaccctccagcggggaagcgcctatggcggggtgctgtccaacttttctggaacagttaaatacagcggctcctcttatcccttccctaccacgagcgaaacaccccgcgtggtctacaattccagaaccgacaagccttggcccgtggctctttatctgacccctgtgagctctgccggcggggtcgcgattaaagccggatccctcatcgctgttctgatcctgcggcagacaaacaattacaacagcgatgactttcagttcgtgtggaatatttacgccaacaatgatgtggtcgtgccgaccggcgggtgcgacgtttctgctcgcgatgtgacggtcacactccccgactatcctggatccgtgcccatccctctgaccgtttactgtgccaagagccaaaaccttggctattacctgtctgggacaaccgcggatgccggaaattccatttttaccaacacagctagcttctcccccgcccagggcgtgggcgtccagctcacgagaaacgggaccatcattccggctaataacacagtgtctctgggagccgtcggcaccagcgccgtgtcccttgggctgacagctaattatgcgcggaccggaggccaggttacggccgggaacgtgcaaagcatcattggagtcacatttgtgtaccagggcggcgggggatctggcggggctgacgttaccatcaccgtgaatggaaaagtcgtggccaagtgaggactagtccctgttcccagagcccacttttttttctttttttgaaataaaatagcctgtctttcagatctcaaaggctcttttcagagccaccaaaaaaaaaaaaaaaaaaaaaaaaaaaaaaaaaaaaaaaaaaaaaaaaaaaaaaaaaaaaaaaaaaaaaaaaaaaaaaaaaaaaaaaaaaaaaaaaaaaaa

SEQ ID NO: 804 - RNA, 1229 nt, synthetic construct
  misc_feature 1..1229: note Artificial____MmIgK(1-20)_Ec(J96)-FimH(22-300)_Linker-PGDGN _Ec(J96)-FimG(24-37) mRNA opt5
  source 1..1229: mol_type = other RNA
aggagagtcccgcagtcggcgtccagcggctctgcttgttcgtgtgtgtgtcgttgcaggccttattcaagcttaccatggagaccgacacactgctcctgtgggtgcttctgctctgggtccccggcagcacggggttcgcctgcaagaccgctaacggaacagccatccctattggcgggggatccgcgaatgtttacgtgaacctggctccggtggtcaatgtgggccagaaccttgttgtggatctgtctacccaaatcttttgtcacaatgactatcccgaaacaattaccgattacgtcacactccagagagggagcgcctatggaggcgtgctgtccaacttctctggcaccgttaaatacagcgggtcctcttatccttttcccacgaccagcgagacacctcgggtggtctacaattcccgcaccgacaagccctggcctgtggccctgtatctcacaccggtgagctctgctggaggcgtcgccatcaaagctgggtccctgattgccgttcttatcctgagacagaccaacaattacaacagcgatgacttccagtttgtgtggaatatctacgcgaacaatgatgtggtcgtgcccacgggaggctgcgacgtttctgcccgggatgtgacagtcaccctccctgactatcccgggtccgtgcctattcccctgacagtttactgtgctaagagccaaaaccttggatattacctgtctggcaccaccgccgatgctggcaattccatcttcacaaacacggccagcttttccccggcgcagggggtgggagtccagctcacccgcaacggcacaattatccctgccaataacaccgtgtctctgggggctgtcggaacaagcgccgtgtccctgggcctcaccgctaattatgccagaacagggggacaggttacggccggcaacgtgcaaagcattatcggcgtcaccttcgtgtaccagcccggggacggaaatgctgatgttaccattacagtgaacggcaaagtcgtggcgaagtgaggactagtccctgttcccagagcccacttttttttctttttttgaaataaaatagcctgtctttcagatctcaaaggctcttttcagagccaccaaaaaaaaaaaaaaaaaaaaaaaaaaaaaaaaaaaaaaaaaaaaaaaaaaaaaaaaaaaaaaaaaaaaaaaaaaaaaaaaaaaaaaaaaaaaaaaaaaaaa

SEQ ID NO: 805 - RNA, 1229 nt, synthetic construct
  misc_feature 1..1229: note Artificial____MmIgK(1-20)_Ec(536)-FimH(22-300)_Linker-PGDGN _Ec(J96)-FimG(24-37) mRNA opt5
  source 1..1229: mol_type = other RNA
aggagagtcccgcagtcggcgtccagcggctctgcttgttcgtgtgtgtgtcgttgcaggccttattcaagcttaccatggagaccgacacactgctcctgtgggtgcttctgctctgggtccccggcagcacggggttcgcctgcaagaccgctaacggaacagccatccctattggcgggggatccgcgaatgtttacgtgaacctggctccggccgtgaatgtcggccagaaccttgtggttgatctgtctacccaaatcttttgtcacaatgactatcccgaaacaattaccgattacgtgacactccagagagggagcgcctatggaggcgtcctgtcctctttcagcggcaccgtgaaatacaacgggtcctcttatccttttcccacgaccagcgagacacctcgggttgtgtacaattcccgcaccgacaagccctggcctgtcgctctgtatctcacaccggtgagctctgccggaggcgtggctatcaaagccgggtccctgattgcggtccttatcctgagacagaccaacaattacaacagcgatgacttccagtttgtttggaatatctacgccaacaatgatgtggtggtccccacgggaggctgcgacgtgtctgctcgggatgttacagtgaccctccctgactatcccgggtccgtccctattcccctgacagtgtactgtgccaagagccaaaaccttggatattacctgtctggcaccaccgctgatgccggcaattccatcttcacaaacacggcgagcttttccccggcccagggggttggagtgcagctcacccgcaacggcacaattatccctgctaataacaccgtctctctgggggccgtgggaacaagcgctgtctccctgggcctcaccgccaattatgccagaacagggggacaggtgacggctggcaacgttcaaagcattatcggcgtgaccttcgtctaccagcccggggacggaaatgcggatgtgaccattacagttaacggcaaagtggtcgccaagtgaggactagtccctgttcccagagcccacttttttttctttttttgaaataaaatagcctgtctttcagatctcaaaggctcttttcagagccaccaaaaaaaaaaaaaaaaaaaaaaaaaaaaaaaaaaaaaaaaaaaaaaaaaaaaaaaaaaaaaaaaaaaaaaaaaaaaaaaaaaaaaaaaaaaaaaaaaaaaa

SEQ ID NO: 806 - RNA, 1253 nt, synthetic construct
  misc_feature 1..1253: note Artificial____HsIgE(1-18)_Ec(J96)-FimH(22-300)_Linker-(G4S) 3_Ec(J96)-FimC(135-148) mRNA opt5
  source 1..1253: mol_type = other RNA
aggagagtcccgcagtcggcgtccagcggctctgcttgttcgtgtgtgtgtcgttgcaggccttattcaagcttaccatggactggacctggatcctgttcctcgtggccgctgccacaagagtccacagctttgcgtgcaagacggctaacggcaccgccattcccatcgggggaggctccgccaatgtttacgtgaacctggctcctgtggtcaatgtggggcagaaccttgttgtggatctgtctacacaaattttctgtcataatgactatccggagaccatcacagattacgtcaccctccagcggggaagcgcctatggcggggtgctgtccaacttttctggaacagttaaatacagcggctcctcttatcccttccctaccacgagcgaaacaccccgcgtggtctacaattccagaaccgacaagccttggcccgtggctctttatctgacccctgtgagctctgccggcggggtcgcgattaaagccggatccctcatcgctgttctgatcctgcggcagacaaacaattacaacagcgatgactttcagttcgtgtggaatatttacgccaacaatgatgtggtcgtgccgaccggcgggtgcgacgtttctgctcgcgatgtgacggtcacactccccgactatcctggatccgtgcccatccctctgaccgtttactgtgccaagagccaaaaccttggctattacctgtctgggacaaccgcggatgccggaaattccatttttaccaacacagctagcttctcccccgcccagggcgtgggcgtccagctcacgagaaacgggaccatcattccggctaataacacagtgtctctgggagccgtcggcaccagcgccgtgtcccttgggctgacagctaattatgcgcggaccggaggccaggttacggccgggaacgtgcaaagcatcattggagtcacatttgtgtaccagggcggcgggggatctggcgggggaggctccgggggcggaggcagcaccgagaataccctccagctggctatcatctctcgcattaaatgaggactagtccctgttcccagagcccacttttttttctttttttgaaataaaatagcctgtctttcagatctcaaaggctcttttcagagccaccaaaaaaaaaaaaaaaaaaaaaaaaaaaaaaaaaaaaaaaaaaaaaaaaaaaaaaaaaaaaaaaaaaaaaaaaaaaaaaaaaaaaaaaaaaaaaaaaaaaaa

SEQ ID NO: 807 - RNA, 1676 nt, synthetic construct
  misc_feature 1..1676: note Artificial____LumSynth(1-154_C37A_N102D)_Linker(GGS)4-GGG_E c(J96)-FimH(22-300)_Linker-PGDGN_Ec(J96)-FimG(24-37) mRNA opt5
  source 1..1676: mol_type = other RNA
aggagagtcccgcagtcggcgtccagcggctctgcttgttcgtgtgtgtgtcgttgcaggccttattcaagcttaccatgcagatctacgagggcaagctgaccgccgaagggctcagattcggaattgtggctagccggtttaaccacgccctggtcgaccgccttgttgagggcgcgatcgatgctattgtgagacatgggggacgggaagaggacatcacactggtgcgcgtccccggctcctgggaaattcctgtggccgccggggagctcgctagaaaagaggatatcgacgccgttatcgctattggagtgctgatccggggcgccacgccgcacttcgattatattgcgtctgaagtcagcaagggccttgccgacctgtccctcgagctgcgcaaacccatcacctttggggtgattacagctgataccctggaacaagccatcgagagagctggaacaaagcatggcaataaagggtgggaggccgcgctctctgccattgaaatggctaacctgttcaagagccttcggggaggctccgggggatctggcggcagcgggggatccggcgggggatttgcctgcaagaccgctaatggcacagccatccctatcgggggaggcagcgccaacgtttacgtgaatctggctcccgtcgtgaacgtgggccagaatctcgtcgttgacctgtctacccagattttctgtcacaacgattatcctgagacgatcaccgactacgtgacacttcagcgcgggtccgcgtatggaggcgtgctgagcaatttttctgggaccgtcaaatactccggaagctcttatcccttccctacaacctccgaaacgccgagagtggtttacaacagccggacagataagccctggcctgtggccctctacctgacccccgtctcctctgctggcggggtggccattaaagccggcagcctgatcgctgttctcattctgcgccaaacaaataactataattccgacgattttcagttcgtgtggaacatctacgccaataacgacgtcgtggtccctaccggaggctgcgacgtgagcgcgagagatgttaccgtgacacttcccgactatccggggtctgtccctatccccctgacggtgtactgtgctaagtcccagaacctcggatattacctgagcggcaccacagccgatgccggaaattctatttttaccaacacagctagcttctcccctgcccagggggttggcgtgcaacttacccggaatgggacgatcattcccgctaacaatacagtctctctgggcgccgtgggaaccagcgcggtgtccctcggcctgaccgccaactatgctcgcacagggggacaggttaccgccggcaatgtccagagcatcattggggtgacatttgtgtaccagcccggagacggcaacgctgatgtcacgatcaccgtgaatgggaaagttgtggccaagtgaggactagtccctgttcccagagcccacttttttttctttttttgaaataaaatagcctgtctttcagatctcaaaggctcttttcagagccaccaaaaaaaaaaaaaaaaaaaaaaaaaaaaaaaaaaaaaaaaaaaaaaaaaaaaaaaaaaaaaaaaaaaaaaaaaaaaaaaaaaaaaaaaaaaaaaaaaaaaa

SEQ ID NO: 808 - RNA, 1694 nt, synthetic construct
  misc_feature 1..1694: note Artificial____HsIgE(1-18)_Ec(J96)-FimH(22-300)_Linker-PGDGN _Ec(J96)-FimG(24-37)_Linker-SGG_LumSynth(1-154_C37A_N102D) mRNA opt5
  source 1..1694: mol_type = other RNA
aggagagtcccgcagtcggcgtccagcggctctgcttgttcgtgtgtgtgtcgttgcaggccttattcaagcttaccatggactggacctggatcctgttcctcgtggccgctgccacaagagtccacagctttgcgtgcaagacggctaacggcaccgccattcccatcgggggaggctccgccaatgtttacgtgaacctggctcctgtggtcaatgtggggcagaaccttgttgtggatctgtctacacaaattttctgtcataatgactatccggagaccatcacagattacgtcaccctccagcggggaagcgcctatggcggggtgctgtccaacttttctggaacagttaaatacagcggctcctcttatcccttccctaccacgagcgaaacaccccgcgtggtctacaattccagaaccgacaagccttggcccgtggctctttatctgacccctgtgagctctgccggcggggtcgcgattaaagccggatccctcatcgctgttctgatcctgcggcagacaaacaattacaacagcgatgactttcagttcgtgtggaatatttacgccaacaatgatgtggtcgtgccgaccggcgggtgcgacgtttctgctcgcgatgtgacggtcacactccccgactatcctggatccgtgcccatccctctgaccgtttactgtgccaagagccaaaaccttggctattacctgtctgggacaaccgcggatgccggaaattccatttttaccaacacagctagcttctcccccgcccagggcgtgggcgtccagctcacgagaaacgggaccatcattccggctaataacacagtgtctctgggagccgtcggcaccagcgccgtgtcccttgggctgacagctaattatgcgcggaccggaggccaggttacggccgggaacgtgcaaagcatcattggagtcacatttgtgtaccagcctggcgacggcaatgctgatgttaccatcaccgtgaacgggaaagtcgtggccaagtctggaggcatgcagatctatgaggggaagctcacagccgaaggactgcgcttcggcattgtggcttccagatttaatcacgccctggttgaccggctcgtcgagggggcgatcgacgctattgtgcgccatggcggaagagaagaggatatcaccctggtgcgggtccccggcagctgggagattcctgtggccgccggggaacttgctcgcaaagaggacatcgatgccgttatcgctattggagtgctgatcagaggcgccacaccccacttcgactacattgcgtctgaagtcagcaaggggctcgccgatctgtcccttgagctgcggaaacccatcacgtttggagtgattaccgctgacacactcgagcaggccatcgaacgcgctggcaccaagcatgggaacaaaggctgggaggccgcgctgtctgccatcgaaatggctaatctgttcaagagcctcagatgaggactagtccctgttcccagagcccacttttttttctttttttgaaataaaatagcctgtctttcagatctcaaaggctcttttcagagccaccaaaaaaaaaaaaaaaaaaaaaaaaaaaaaaaaaaaaaaaaaaaaaaaaaaaaaaaaaaaaaaaaaaaaaaaaaaaaaaaaaaaaaaaaaaaaaaaaaaaaa

SEQ ID NO: 809 - RNA, 1721 nt, synthetic construct
  misc_feature 1..1721: note Artificial____HsIgE(1-18)_Ec(J96)-FimH(22-300)_Linker-PGDGN _Ec(J96)-FimG(24-37)_Linker-SGG_Ferritin(5-167_N19Q) mRNA opt5
  source 1..1721: mol_type = other RNA
aggagagtcccgcagtcggcgtccagcggctctgcttgttcgtgtgtgtgtcgttgcaggccttattcaagcttaccatggactggacctggatcctgttcctcgtggccgctgccacaagagtccacagctttgcgtgcaagacggctaacggcaccgccattcccatcgggggaggctccgccaatgtttacgtgaacctggctcctgtggtcaatgtggggcagaaccttgttgtggatctgtctacacaaattttctgtcataatgactatccggagaccatcacagattacgtcaccctccagcggggaagcgcctatggcggggtgctgtccaacttttctggaacagttaaatacagcggctcctcttatcccttccctaccacgagcgaaacaccccgcgtggtctacaattccagaaccgacaagccttggcccgtggctctttatctgacccctgtgagctctgccggcggggtcgcgattaaagccggatccctcatcgctgttctgatcctgcggcagacaaacaattacaacagcgatgactttcagttcgtgtggaatatttacgccaacaatgatgtggtcgtgccgaccggcgggtgcgacgtttctgctcgcgatgtgacggtcacactccccgactatcctggatccgtgcccatccctctgaccgtttactgtgccaagagccaaaaccttggctattacctgtctgggacaaccgcggatgccggaaattccatttttaccaacacagctagcttctcccccgcccagggcgtgggcgtccagctcacgagaaacgggaccatcattccggctaataacacagtgtctctgggagccgtcggcaccagcgccgtgtcccttgggctgacagctaattatgcgcggaccggaggccaggttacggccgggaacgtgcaaagcatcattggagtcacatttgtgtaccagcctggcgacggcaatgctgatgttaccatcaccgtgaacgggaaagtcgtggccaagtctggaggcgacatcattaagctcctgaatgaacaggtgaacaaagagatgcagtccagcaatctgtatatgtctatgagctcctggtgctacacacactctctcgacggggccggactgttcctttttgatcatgctgccgaggaatacgagcacgcgaagaaactgatcattttcctcaacgagaataacgttcccgtccaactgaccagcatctccgctcctgaacataagtttgagggccttacacagattttccagaaagcctatgaacacgagcaacacatcagcgagtctatcaataacattgtggaccatgccatcaagtccaaggatcacgctacgttcaattttctgcagtggtacgtggccgaacagcatgaggaagaggtcctcttcaaagacattctggataagatcgaactgattgggaacgagaaccacggcctctatctggctgaccagtacgtgaaaggaatcgccaagagccgcaaatcttgaggactagtccctgttcccagagcccacttttttttctttttttgaaataaaatagcctgtctttcagatctcaaaggctcttttcagagccaccaaaaaaaaaaaaaaaaaaaaaaaaaaaaaaaaaaaaaaaaaaaaaaaaaaaaaaaaaaaaaaaaaaaaaaaaaaaaaaaaaaaaaaaaaaaaaaaaaaaaa

SEQ ID NO: 810 - RNA, 1751 nt, synthetic construct
  misc_feature 1..1751: note Artificial____MmIgK(1-20)_Ec(J96)-FimH(22-300)_Linker-PGDGN _Ec(J96)-FimG(24-37)_Linker-(GGS)4_Ferritin(5-166) mRNA opt5
  source 1..1751: mol_type = other RNA
aggagagtcccgcagtcggcgtccagcggctctgcttgttcgtgtgtgtgtcgttgcaggccttattcaagcttaccatggagaccgacacactgctcctgtgggtgcttctgctctgggtccccggcagcacggggttcgcctgcaagaccgctaacggaacagccatccctattggcgggggatccgcgaatgtttacgtgaacctggctccggtggtcaatgtgggccagaaccttgttgtggatctgtctacccaaatcttttgtcacaatgactatcccgaaacaattaccgattacgtcacactccagagagggagcgcctatggaggcgtgctgtccaacttctctggcaccgttaaatacagcgggtcctcttatccttttcccacgaccagcgagacacctcgggtggtctacaattcccgcaccgacaagccctggcctgtggccctgtatctcacaccggtgagctctgctggaggcgtcgccatcaaagctgggtccctgattgccgttcttatcctgagacagaccaacaattacaacagcgatgacttccagtttgtgtggaatatctacgcgaacaatgatgtggtcgtgcccacgggaggctgcgacgtttctgcccgggatgtgacagtcaccctccctgactatcccgggtccgtgcctattcccctgacagtttactgtgctaagagccaaaaccttggatattacctgtctggcaccaccgccgatgctggcaattccatcttcacaaacacggccagcttttccccggcgcagggggtgggagtccagctcacccgcaacggcacaattatccctgccaataacaccgtgtctctgggggctgtcggaacaagcgccgtgtccctgggcctcaccgctaattatgccagaacagggggacaggttacggccggcaacgtgcaaagcattatcggcgtcaccttcgtgtaccagcccggggacggaaatgctgatgttaccattacagtgaacggcaaagtcgtggcgaaagggggatctggcgggtccggcggaagcggcgggtctgacatcatcaagctgcttaatgaacaggtgaacaaggagatgaatagctccaacctgtatatgtctatgagctcctggtgctacacccatagcctcgacggagccggcctgtttcttttcgatcacgctgccgaagagtacgagcatgccaagaaactgattatctttctcaatgaaaacaatgttcctgtccagctgacatctatttccgctcccgagcacaagttcgaagggctgacgcaaatctttcagaaagcctatgagcatgagcagcacattagcgaatctatcaacaatatcgtggaccacgcgattaagtccaaggatcatgctaccttcaacttcctccaatggtacgtggccgagcagcacgaagaggaagtcctgtttaaagacatccttgataagattgagctgatcggaaacgagaatcatggcctctatctggccgaccagtacgtgaaagggattgctaagagccggaaatgaggactagtccctgttcccagagcccacttttttttctttttttgaaataaaatagcctgtctttcagatctcaaaggctcttttcagagccaccaaaaaaaaaaaaaaaaaaaaaaaaaaaaaaaaaaaaaaaaaaaaaaaaaaaaaaaaaaaaaaaaaaaaaaaaaaaaaaaaaaaaaaaaaaaaaaaaaaaaa

SEQ ID NO: 811 - RNA, 1394 nt, synthetic construct
  misc_feature 1..1394: note Artificial____HsIgE(1-18)_Ec(J96)-FimH(22-300)_Linker-PGDGN _Ec(J96)-FimG(24-37)_TMdomain-HA(510-566) mRNA opt5
  source 1..1394: mol_type = other RNA
aggagagtcccgcagtcggcgtccagcggctctgcttgttcgtgtgtgtgtcgttgcaggccttattcaagcttaccatggactggacctggatcctgttcctcgtggccgctgccacaagagtccacagctttgcgtgcaagacggctaacggcaccgccattcccatcgggggaggctccgccaatgtttacgtgaacctggctcctgtggtcaatgtggggcagaaccttgttgtggatctgtctacacaaattttctgtcataatgactatccggagaccatcacagattacgtcaccctccagcggggaagcgcctatggcggggtgctgtccaacttttctggaacagttaaatacagcggctcctcttatcccttccctaccacgagcgaaacaccccgcgtggtctacaattccagaaccgacaagccttggcccgtggctctttatctgacccctgtgagctctgccggcggggtcgcgattaaagccggatccctcatcgctgttctgatcctgcggcagacaaacaattacaacagcgatgactttcagttcgtgtggaatatttacgccaacaatgatgtggtcgtgccgaccggcgggtgcgacgtttctgctcgcgatgtgacggtcacactccccgactatcctggatccgtgcccatccctctgaccgtttactgtgccaagagccaaaaccttggctattacctgtctgggacaaccgcggatgccggaaattccatttttaccaacacagctagcttctcccccgcccagggcgtgggcgtccagctcacgagaaacgggaccatcattccggctaataacacagtgtctctgggagccgtcggcaccagcgccgtgtcccttgggctgacagctaattatgcgcggaccggaggccaggttacggccgggaacgtgcaaagcatcattggagtcacatttgtgtaccagcctggcgacggcaatgctgatgttaccatcaccgtgaacgggaaagtcgtggccaaggccaagctcaatcgcgaggaaatcgacggagtgaaactggagtctacaagaatttatcagatcctggctatttactccaccgttgccagctctctcgtcctggtggtgagccttggcgcgatctccttctggatgtgctctaacgggagcctgcagtgtcggatttgcatctgaggactagtccctgttcccagagcccacttttttttctttttttgaaataaaatagcctgtctttcagatctcaaaggctcttttcagagccaccaaaaaaaaaaaaaaaaaaaaaaaaaaaaaaaaaaaaaaaaaaaaaaaaaaaaaaaaaaaaaaaaaaaaaaaaaaaaaaaaaaaaaaaaaaaaaaaaaaaaa

SEQ ID NO: 812 - RNA, 1727 nt, synthetic construct
  misc_feature 1..1727: note Artificial____HsIgE(1-18)_LumSynth(1-154_C37A_N102D)_Linker (GGS)4-GGG_Ec(J96)-FimH(22-300)_Linker-PGDGN_Ec(J96)-FimG(2 4-37) mRNA opt5
  source 1..1727: mol_type = other RNA
aggagagtcccgcagtcggcgtccagcggctctgcttgttcgtgtgtgtgtcgttgcaggccttattcaagcttaccatggactggacctggatcctgttcctcgtggccgctgccacaagagtccacagccagatttacgagggcaagctgacggcggaagggcttcggtttggaatcgttgcttcccgcttcaaccatgccctggtggatagactcgtggagggcgccattgacgctatcgtccggcacgggggacgcgaagaggatattaccctggtgagagttcccggctcttgggaaatccctgtggccgctggggagcttgcccggaaagaggacatcgatgcggtcattgccatcggagtgctgattcgcggcgctacaccgcattttgactatatcgccagcgaagtttccaagggcctcgctgatctgtctctggagctcagaaaacccattaccttcggggtgatcacagccgacaccctggaacaagcgattgagcgggccggaacaaagcacggcaataaagggtgggaggctgcccttagcgctatcgaaatggccaacctgtttaagtccctccgcggaggctctgggggaagcggcggctccgggggaagcggcgggggattcgcctgcaagaccgctaatggcacggcgatccctattgggggaggctctgccaacgtctacgtgaatctggctcccgtggtcaacgttggccagaatcttgtggtggatctgtccacccagatcttttgtcataacgactatcctgagacaattaccgattacgtcacactccagagagggagcgcctatggaggcgtgctgtctaatttctccgggaccgttaaatacagcggatcttcctatccctttcctacgacaagcgaaaccccgcgggtggtctacaactcccgcacagacaagccctggcctgtggccctgtacctcacccccgtttctagcgctggcggggtggccatcaaagcgggctccctgattgctgtccttatcctgagacaaaccaataactataatagcgatgacttccagtttgtgtggaacatctacgccaataacgacgtcgtggttcctacaggaggctgcgatgtgtctgcccgggacgtcacggtgaccctccccgattatccggggtccgttcctattcccctgacagtgtactgtgctaagagccagaaccttggatattacctgtctggcaccacagccgacgctgggaatagcatcttcaccaacacggcctccttttctcctgcgcagggagtcggcgtgcaactcacacgcaatgggaccattatccccgccaacaataccgtgagcctgggcgctgttggaacatccgccgtcagcctgggcctcaccgctaactatgccagaacagggggacaggtgacggcgggcaatgtgcagtctattatcggggtcaccttcgtgtaccagcccggagatggcaacgccgacgttacaatcaccgtgaatgggaaagtcgtggctaagtgaggactagtccctgttcccagagcccacttttttttctttttttgaaataaaatagcctgtctttcagatctcaaaggctcttttcagagccaccaaaaaaaaaaaaaaaaaaaaaaaaaaaaaaaaaaaaaaaaaaaaaaaaaaaaaaaaaaaaaaaaaaaaaaaaaaaaaaaaaaaaaaaaaaaaaaaaaaaaa

SEQ ID NO: 813 - RNA, 1694 nt, synthetic construct
  misc_feature 1..1694: note Artificial____HsIgE(1-18)_Ec(J96)-FimH(22-300_N28S_N91S_N24 9Q)_Linker-PGDGN_Ec(J96)-FimG(24-37)_Linker-SGG_LumSynth(1- 154_C37A_N102D) mRNA opt5
  source 1..1694: mol_type = other RNA
aggagagtcccgcagtcggcgtccagcggctctgcttgttcgtgtgtgtgtcgttgcaggccttattcaagcttaccatggactggacctggatcctgttcctcgtggccgctgccacaagagtccacagctttgcgtgcaagacggcttccggcaccgccattcccatcgggggaggctctgccaacgtttacgtgaatctggctcctgtggtcaacgtggggcagaatcttgttgtggatctgagcacacaaattttctgtcataacgactatccggagaccatcacagattacgtcaccctccagcggggatccgcctatggcggggtgctgtctagcttttccggaacagttaaatactctggcagctcctatcccttccctaccacgagcgaaacaccccgcgtggtctacaattctagaaccgacaagccttggcccgtggctctttatctgacccctgtgtccagcgccggcggggtcgcgattaaagccggatctctcatcgctgttctgatcctgcggcagacaaacaattacaactccgatgactttcagttcgtgtggaatatttacgccaacaatgatgtggtcgtgccgaccggcgggtgcgacgttagcgctcgcgatgtgacggtcacactccccgactatcctggatctgtgcccatccctctgaccgtttactgtgccaagtcccaaaaccttggctattacctgagcgggacaaccgcggatgccggaaattccatttttaccaacacagcttctttcagccccgcccagggcgtgggcgtccagctcacgagacaggggaccatcattccggctaataacacagtgtccctgggagccgtcggcaccagcgccgtgtctcttgggctgacagctaactatgcgcggaccggaggccaagttacggccgggaatgtgcagtccatcattggagtcacatttgtgtaccagcctggcgacggcaacgctgatgttaccatcaccgtgaatgggaaagtcgtggccaagagcggaggcatgcagatctatgaggggaagctcacagccgaaggactgcgcttcggcattgtggcttctagatttaaccacgccctggttgaccggctcgtcgagggggcgatcgacgctattgtgcgccatggcggaagagaagaggatatcaccctggtgcgggtccccggcagctgggagattcctgtggccgccggggaacttgctcgcaaagaggacatcgatgccgttatcgctattggagtgctgatcagaggcgccacaccccacttcgactacattgcgtccgaagtctctaaggggctcgccgatctgagccttgagctgcggaaacccatcacgtttggagtgattaccgctgacacactcgagcaagccatcgaacgcgctggcaccaagcatgggaataaaggctgggaggccgcgctgtccgccatcgaaatggctaacctgttcaagagcctcagatgaggactagtccctgttcccagagcccacttttttttctttttttgaaataaaatagcctgtctttcagatctcaaaggctcttttcagagccaccaaaaaaaaaaaaaaaaaaaaaaaaaaaaaaaaaaaaaaaaaaaaaaaaaaaaaaaaaaaaaaaaaaaaaaaaaaaaaaaaaaaaaaaaaaaaaaaaaaaaa

SEQ ID NO: 814 - RNA, 1694 nt, synthetic construct
  misc_feature 1..1694: note Artificial____HsIgE(1-18)_Ec(J96)-FimH(22-300_N28S_N91S_N24 9Q_N256D)_Linker-PGDGN_Ec(J96)-FimG(24-37)_Linker-SGG_LumSy nth(1-154_C37A_N102D) mRNA opt5
  source 1..1694: mol_type = other RNA
aggagagtcccgcagtcggcgtccagcggctctgcttgttcgtgtgtgtgtcgttgcaggccttattcaagcttaccatggactggacctggatcctgttcctcgtggccgctgccacaagagtccacagctttgcgtgcaagacggcttccggcaccgccattcccatcgggggaggctctgccaacgtttacgtgaatctggctcctgtggtcaacgtggggcagaatcttgttgtggatctgagcacacaaattttctgtcataacgactatccggagaccatcacagattacgtcaccctccagcggggatccgcctatggcggggtgctgtctagcttttccggaacagttaaatactctggcagctcctatcccttccctaccacgagcgaaacaccccgcgtggtctacaattctagaaccgacaagccttggcccgtggctctttatctgacccctgtgtccagcgccggcggggtcgcgattaaagccggatctctcatcgctgttctgatcctgcggcagacaaacaattacaactccgatgactttcagttcgtgtggaatatttacgccaacaatgatgtggtcgtgccgaccggcgggtgcgacgttagcgctcgcgatgtgacggtcacactccccgactatcctggatctgtgcccatccctctgaccgtttactgtgccaagtcccaaaaccttggctattacctgagcgggacaaccgcggatgccggaaattccatttttaccaacacagcttctttcagccccgcccagggcgtgggcgtccagctcacgagacaggggaccatcattccggctgacaatacagtgtccctgggagccgtcggcaccagcgccgtgtctcttgggctgacagctaactatgcgcggaccggaggccaagttacggccgggaacgtgcagtccatcattggagtcacatttgtgtaccagcctggcgatggcaatgctgacgttaccatcaccgtgaacgggaaagtcgtggccaagagcggaggcatgcagatctatgaggggaagctcacagccgaaggactgcgcttcggcattgtggcttctagatttaatcacgccctggttgaccggctcgtcgagggggcgatcgatgctattgtgcgccatggcggaagagaagaggacatcaccctggtgcgggtccccggcagctgggagattcctgtggccgccggggaacttgctcgcaaagaggatatcgacgccgttatcgctattggagtgctgatcagaggcgccacaccccacttcgattacattgcgtccgaagtctctaaggggctcgccgacctgagccttgagctgcggaaacccatcacgtttggagtgattaccgctgatacactcgagcaagccatcgaacgcgctggcaccaagcatgggaacaaaggctgggaggccgcgctgtccgccatcgaaatggctaatctgttcaagagcctcagatgaggactagtccctgttcccagagcccacttttttttctttttttgaaataaaatagcctgtctttcagatctcaaaggctcttttcagagccaccaaaaaaaaaaaaaaaaaaaaaaaaaaaaaaaaaaaaaaaaaaaaaaaaaaaaaaaaaaaaaaaaaaaaaaaaaaaaaaaaaaaaaaaaaaaaaaaaaaaaa

SEQ ID NO: 815 - RNA, 1694 nt, synthetic construct
  misc_feature 1..1694: note Artificial____HsIgE(1-18)_Ec(J96)-FimH(22-300_N28S_V48C_L55 C_N91S_N249Q)_Linker-PGDGN_Ec(J96)-FimG(24-37)_Linker-SGG_L umSynth(1-154_C37A_N102D) mRNA opt5
  source 1..1694: mol_type = other RNA
aggagagtcccgcagtcggcgtccagcggctctgcttgttcgtgtgtgtgtcgttgcaggccttattcaagcttaccatggactggacctggatcctgttcctcgtggccgctgccacaagagtccacagctttgcgtgcaagacggcttccggcaccgccattcccatcgggggaggctctgccaacgtttacgtgaatctggctccttgtgtgaacgtcgggcagaattgcgtggttgatcttagcacacaaattttctgtcataacgactatccggagaccatcacagattacgtgaccctgcagcggggatccgcctatggcggggtcctctctagcttttccggaacagtgaaatactctggcagctcctatcccttccctaccacgagcgaaacaccccgcgttgtgtacaattctagaaccgacaagccttggcccgtcgctctgtatcttacccctgtgtccagcgccggcggggtggcgattaaagccggatctctgatcgctgtcctcatcctgcggcagacaaacaattacaactccgatgactttcagttcgtttggaatatttacgccaacaatgatgtggtggtcccgaccggcgggtgcgacgtgagcgctcgcgatgttacggtgacactgcccgactatcctggatctgtccccatccctctcaccgtgtactgtgccaagtcccaaaacctgggctattaccttagcgggacaaccgcggatgccggaaattccatttttaccaacacagcttctttcagccccgcccagggcgttggcgtgcagctgacgagacaggggaccatcattccggctaataacacagtctccctcggagccgtgggcaccagcgccgtctctctggggcttacagctaactatgcgcggaccggaggccaagtgacggccgggaatgttcagtccatcattggagtgacatttgtctaccagcctggcgacggcaacgctgatgtgaccatcaccgttaatgggaaagtggtcgccaagagcggaggcatgcagatctatgaggggaagctgacagccgaaggactccgcttcggcattgtggcttctagatttaaccacgccctggtggaccggctggttgagggggcgatcgacgctattgtccgccatggcggaagagaagaggatatcaccctcgtgcgggtgcccggcagctgggagattcctgtcgccgccggggaactggctcgcaaagaggacatcgatgccgtgatcgctattggagttcttatcagaggcgccacaccccacttcgactacattgcgtccgaagtgtctaaggggctggccgatctcagcctggagcttcggaaacccatcacgtttggagtcattaccgctgacacactggagcaagccatcgaacgcgctggcaccaagcatgggaataaaggctgggaggccgcgctctccgccatcgaaatggctaacctgttcaagagcctgagatgaggactagtccctgttcccagagcccacttttttttctttttttgaaataaaatagcctgtctttcagatctcaaaggctcttttcagagccaccaaaaaaaaaaaaaaaaaaaaaaaaaaaaaaaaaaaaaaaaaaaaaaaaaaaaaaaaaaaaaaaaaaaaaaaaaaaaaaaaaaaaaaaaaaaaaaaaaaaaa

SEQ ID NO: 816 - RNA, 1694 nt, synthetic construct
  misc_feature 1..1694: note Artificial____HsIgE(1-18)_Ec(J96)-FimH(22-300_F165V)_Linker -PGDGN_Ec(J96)-FimG(24-37)_Linker-SGG_LumSynth(1-154_C37A_N 102D) mRNA opt5
  source 1..1694: mol_type = other RNA
aggagagtcccgcagtcggcgtccagcggctctgcttgttcgtgtgtgtgtcgttgcaggccttattcaagcttaccatggactggacctggatcctgttcctcgtggccgctgccacaagagtccacagctttgcgtgcaagacggctaacggcaccgccattcccatcgggggaggctccgccaatgtttacgtgaacctggctcctgtggtcaatgtggggcagaaccttgttgtggatctgtctacacaaattttctgtcataatgactatccggagaccatcacagattacgtcaccctccagcggggaagcgcctatggcggggtgctgtccaacttttctggaacagttaaatacagcggctcctcttatcccttccctaccacgagcgaaacaccccgcgtggtctacaattccagaaccgacaagccttggcccgtggctctttatctgacccctgtgagctctgccggcggggtcgcgattaaagccggatccctcatcgctgttctgatcctgcggcagacaaacaattacaacagcgatgactttcaggtggtgtggaatatttacgccaacaatgatgtcgtggttccgaccggcgggtgcgacgtgtctgctcgcgatgtcacggtgacactccccgactatcctggatccgttcccatccctctgaccgtgtactgtgccaagagccaaaaccttggctattacctgtctgggacaaccgcggatgccggaaattccattttcaccaacacagctagcttttcccccgcccagggcgtcggcgtgcagctcacgagaaacgggaccatcattccggctaataacacagtctctctgggagccgtgggcaccagcgccgtttcccttgggctgacagctaattatgcgcggaccggaggccaggtgacggccgggaacgtccaaagcatcattggagtgacattcgtttaccagcctggcgacggcaatgctgatgtgaccatcaccgtcaacgggaaagtggtggccaagtctggaggcatgcagatctatgaggggaagctcacagccgaaggactgcgctttggcattgttgcttccagattcaatcacgccctggtcgaccggctcgtggagggggcgatcgacgctattgtgcgccatggcggaagagaagaggatatcaccctggtccgggtgcccggcagctgggagattcctgttgccgccggggaacttgctcgcaaagaggacatcgatgccgtgatcgctattggagtcctgatcagaggcgccacaccccactttgactacattgcgtctgaagtgagcaaggggctcgccgatctgtcccttgagctgcggaaacccatcacgttcggagttattaccgctgacacactcgagcaggccatcgaacgcgctggcaccaagcatgggaacaaaggctgggaggccgcgctgtctgccatcgaaatggctaatctgtttaagagcctcagatgaggactagtccctgttcccagagcccacttttttttctttttttgaaataaaatagcctgtctttcagatctcaaaggctcttttcagagccaccaaaaaaaaaaaaaaaaaaaaaaaaaaaaaaaaaaaaaaaaaaaaaaaaaaaaaaaaaaaaaaaaaaaaaaaaaaaaaaaaaaaaaaaaaaaaaaaaaaaaa

SEQ ID NO: 817 - RNA, 1721 nt, synthetic construct
  misc_feature 1..1721: note Artificial____HsIgE(1-18)_Ec(J96)-FimH(22-300_N28S_N91S_N24 9Q)_Linker-PGDGN_Ec(J96)-FimG(24-37)_Linker-SGG_Ferritin(5- 167_N19Q) mRNA opt5
  source 1..1721: mol_type = other RNA
aggagagtcccgcagtcggcgtccagcggctctgcttgttcgtgtgtgtgtcgttgcaggccttattcaagcttaccatggactggacctggatcctgttcctcgtggccgctgccacaagagtccacagctttgcgtgcaagacggcttccggcaccgccattcccatcgggggaggctctgccaacgtttacgtgaatctggctcctgtggtcaacgtggggcagaatcttgttgtggatctgagcacacaaattttctgtcataacgactatccggagaccatcacagattacgtcaccctccagcggggatccgcctatggcggggtgctgtctagcttttccggaacagttaaatactctggcagctcctatcccttccctaccacgagcgaaacaccccgcgtggtctacaattctagaaccgacaagccttggcccgtggctctttatctgacccctgtgtccagcgccggcggggtcgcgattaaagccggatctctcatcgctgttctgatcctgcggcagacaaacaattacaactccgatgactttcagttcgtgtggaatatttacgccaacaatgatgtggtcgtgccgaccggcgggtgcgacgttagcgctcgcgatgtgacggtcacactccccgactatcctggatctgtgcccatccctctgaccgtttactgtgccaagtcccaaaaccttggctattacctgagcgggacaaccgcggatgccggaaattccatttttaccaacacagcttctttcagccccgcccagggcgtgggcgtccagctcacgagacaggggaccatcattccggctaataacacagtgtccctgggagccgtcggcaccagcgccgtgtctcttgggctgacagctaactatgcgcggaccggaggccaagttacggccgggaatgtgcagtccatcattggagtcacatttgtgtaccagcctggcgacggcaacgctgatgttaccatcaccgtgaatgggaaagtcgtggccaagagcggaggcgacatcattaagctcctgaacgaacaggtgaataaagagatgcaatctagcaacctgtatatgtccatgtctagctggtgctacacacactccctcgacggggccggactgttcctttttgatcatgctgccgaggaatacgagcacgcgaagaaactgatcattttcctcaatgagaacaatgttcccgtccagctgaccagcatctctgctcctgaacataagtttgagggccttacacagattttccaaaaagcctatgaacacgagcagcacatctccgagagcatcaacaatattgtggaccatgccatcaagtctaaggatcacgctacgttcaactttctgcagtggtacgtggccgaacagcatgaggaagaggtcctcttcaaagacattctggataagatcgaactgattgggaatgagaaccacggcctctatctggctgaccaatacgtgaaaggaatcgccaagtcccgcaaaagctgaggactagtccctgttcccagagcccacttttttttctttttttgaaataaaatagcctgtctttcagatctcaaaggctcttttcagagccaccaaaaaaaaaaaaaaaaaaaaaaaaaaaaaaaaaaaaaaaaaaaaaaaaaaaaaaaaaaaaaaaaaaaaaaaaaaaaaaaaaaaaaaaaaaaaaaaaaaaaa

SEQ ID NO: 818 - RNA, 1721 nt, synthetic construct
  misc_feature 1..1721: note Artificial____HsIgE(1-18)_Ec(J96)-FimH(22-300_N28S_N91S_N24 9Q_N256D)_Linker-PGDGN_Ec(J96)-FimG(24-37)_Linker-SGG_Ferri tin(5-167_N19Q) mRNA opt5
  source 1..1721: mol_type = other RNA
aggagagtcccgcagtcggcgtccagcggctctgcttgttcgtgtgtgtgtcgttgcaggccttattcaagcttaccatggactggacctggatcctgttcctcgtggccgctgccacaagagtccacagctttgcgtgcaagacggcttccggcaccgccattcccatcgggggaggctctgccaacgtttacgtgaatctggctcctgtggtcaacgtggggcagaatcttgttgtggatctgagcacacaaattttctgtcataacgactatccggagaccatcacagattacgtcaccctccagcggggatccgcctatggcggggtgctgtctagcttttccggaacagttaaatactctggcagctcctatcccttccctaccacgagcgaaacaccccgcgtggtctacaattctagaaccgacaagccttggcccgtggctctttatctgacccctgtgtccagcgccggcggggtcgcgattaaagccggatctctcatcgctgttctgatcctgcggcagacaaacaattacaactccgatgactttcagttcgtgtggaatatttacgccaacaatgatgtggtcgtgccgaccggcgggtgcgacgttagcgctcgcgatgtgacggtcacactccccgactatcctggatctgtgcccatccctctgaccgtttactgtgccaagtcccaaaaccttggctattacctgagcgggacaaccgcggatgccggaaattccatttttaccaacacagcttctttcagccccgcccagggcgtgggcgtccagctcacgagacaggggaccatcattccggctgacaatacagtgtccctgggagccgtcggcaccagcgccgtgtctcttgggctgacagctaactatgcgcggaccggaggccaagttacggccgggaacgtgcagtccatcattggagtcacatttgtgtaccagcctggcgatggcaatgctgacgttaccatcaccgtgaacgggaaagtcgtggccaagagcggaggcgacatcattaagctcctgaatgaacaggtgaacaaagagatgcaatctagcaatctgtatatgtccatgtctagctggtgctacacacactccctcgatggggccggactgttcctttttgaccatgctgccgaggaatacgagcacgcgaagaaactgatcattttcctcaacgagaataacgttcccgtccagctgaccagcatctctgctcctgaacataagtttgagggccttacacagattttccaaaaagcctatgaacacgagcagcacatctccgagagcatcaataacattgtggatcatgccatcaagtctaaggaccacgctacgttcaattttctgcagtggtacgtggccgaacagcatgaggaagaggtcctcttcaaagatattctggacaagatcgaactgattgggaacgagaatcacggcctctatctggctgatcaatacgtgaaaggaatcgccaagtcccgcaaaagctgaggactagtccctgttcccagagcccacttttttttctttttttgaaataaaatagcctgtctttcagatctcaaaggctcttttcagagccaccaaaaaaaaaaaaaaaaaaaaaaaaaaaaaaaaaaaaaaaaaaaaaaaaaaaaaaaaaaaaaaaaaaaaaaaaaaaaaaaaaaaaaaaaaaaaaaaaaaaaa

SEQ ID NO: 819 - RNA, 1721 nt, synthetic construct
  misc_feature 1..1721: note Artificial____HsIgE(1-18)_Ec(J96)-FimH(22-300_N28S_V48C_L55 C_N91S_N249Q)_Linker-PGDGN_Ec(J96)-FimG(24-37)_Linker-SGG_F erritin(5-167_N19Q) mRNA opt5
  source 1..1721: mol_type = other RNA
aggagagtcccgcagtcggcgtccagcggctctgcttgttcgtgtgtgtgtcgttgcaggccttattcaagcttaccatggactggacctggatcctgttcctcgtggccgctgccacaagagtccacagctttgcgtgcaagacggcttccggcaccgccattcccatcgggggaggctctgccaacgtttacgtgaatctggctccttgtgtgaacgtcgggcagaattgcgtggttgatcttagcacacaaattttctgtcataacgactatccggagaccatcacagattacgtgaccctgcagcggggatccgcctatggcggggtcctctctagcttttccggaacagtgaaatactctggcagctcctatcccttccctaccacgagcgaaacaccccgcgttgtgtacaattctagaaccgacaagccttggcccgtcgctctgtatcttacccctgtgtccagcgccggcggggtggcgattaaagccggatctctgatcgctgtcctcatcctgcggcagacaaacaattacaactccgatgactttcagttcgtttggaatatttacgccaacaatgatgtggtggtcccgaccggcgggtgcgacgtgagcgctcgcgatgttacggtgacactgcccgactatcctggatctgtccccatccctctcaccgtgtactgtgccaagtcccaaaacctgggctattaccttagcgggacaaccgcggatgccggaaattccatttttaccaacacagcttctttcagccccgcccagggcgttggcgtgcagctgacgagacaggggaccatcattccggctaataacacagtctccctcggagccgtgggcaccagcgccgtctctctggggcttacagctaactatgcgcggaccggaggccaagtgacggccgggaatgttcagtccatcattggagtgacatttgtctaccagcctggcgacggcaacgctgatgtgaccatcaccgttaatgggaaagtggtcgccaagagcggaggcgacatcattaagctgctcaacgaacaggtgaataaagagatgcaatctagcaacctgtatatgtccatgtctagctggtgctacacacactccctggacggggccggactcttcctgtttgatcatgctgccgaggaatacgagcacgcgaagaaacttatcattttcctgaatgagaacaatgtgcccgttcagctcaccagcatctctgctcctgaacataagtttgagggcctgacacagattttccaaaaagcctatgaacacgagcagcacatctccgagagcatcaacaatattgtcgaccatgccatcaagtctaaggatcacgctacgttcaactttcttcagtggtacgtggccgaacagcatgaggaagaggtgctgttcaaagacattctcgataagatcgaactgattgggaatgagaaccacggcctgtatctcgctgaccaatacgtcaaaggaatcgccaagtcccgcaaaagctgaggactagtccctgttcccagagcccacttttttttctttttttgaaataaaatagcctgtctttcagatctcaaaggctcttttcagagccaccaaaaaaaaaaaaaaaaaaaaaaaaaaaaaaaaaaaaaaaaaaaaaaaaaaaaaaaaaaaaaaaaaaaaaaaaaaaaaaaaaaaaaaaaaaaaaaaaaaaaa

SEQ ID NO: 820 - RNA, 1721 nt, synthetic construct
  misc_feature 1..1721: note Artificial____HsIgE(1-18)_Ec(J96)-FimH(22-300_F165V)_Linker -PGDGN_Ec(J96)-FimG(24-37)_Linker-SGG_Ferritin(5-167_N19Q) mRNA opt5
  source 1..1721: mol_type = other RNA
aggagagtcccgcagtcggcgtccagcggctctgcttgttcgtgtgtgtgtcgttgcaggccttattcaagcttaccatggactggacctggatcctgttcctcgtggccgctgccacaagagtccacagctttgcgtgcaagacggctaacggcaccgccattcccatcgggggaggctccgccaatgtttacgtgaacctggctcctgtggtcaatgtggggcagaaccttgttgtggatctgtctacacaaattttctgtcataatgactatccggagaccatcacagattacgtcaccctccagcggggaagcgcctatggcggggtgctgtccaacttttctggaacagttaaatacagcggctcctcttatcccttccctaccacgagcgaaacaccccgcgtggtctacaattccagaaccgacaagccttggcccgtggctctttatctgacccctgtgagctctgccggcggggtcgcgattaaagccggatccctcatcgctgttctgatcctgcggcagacaaacaattacaacagcgatgactttcaggtggtgtggaatatttacgccaacaatgatgtcgtggttccgaccggcgggtgcgacgtgtctgctcgcgatgtcacggtgacactccccgactatcctggatccgttcccatccctctgaccgtgtactgtgccaagagccaaaaccttggctattacctgtctgggacaaccgcggatgccggaaattccattttcaccaacacagctagcttttcccccgcccagggcgtcggcgtgcagctcacgagaaacgggaccatcattccggctaataacacagtctctctgggagccgtgggcaccagcgccgtttcccttgggctgacagctaattatgcgcggaccggaggccaggtgacggccgggaacgtccaaagcatcattggagtgacattcgtttaccagcctggcgacggcaatgctgatgtgaccatcaccgtcaacgggaaagtggtggccaagtctggaggcgacatcattaagctcctgaatgagcaggttaacaaagaaatgcagtccagcaatctgtatatgtctatgagctcctggtgctacacacactctctcgacggggccggactgtttcttttcgatcatgctgccgaggaatacgagcacgcgaagaaactgatcatttttctcaacgagaataacgtccccgtgcaactgaccagcatctccgctcctgaacataagttcgagggccttacacagatttttcagaaagcctatgaacacgagcaacacatcagcgagtctatcaataacattgtggaccatgccatcaagtccaaggatcacgctacgttcaatttcctgcagtggtacgtcgccgaacagcatgaggaagaggtgctctttaaagacattctggataagatcgaactgattgggaacgagaaccacggcctctatctggctgaccagtacgttaaaggaatcgccaagagccgcaaatcttgaggactagtccctgttcccagagcccacttttttttctttttttgaaataaaatagcctgtctttcagatctcaaaggctcttttcagagccaccaaaaaaaaaaaaaaaaaaaaaaaaaaaaaaaaaaaaaaaaaaaaaaaaaaaaaaaaaaaaaaaaaaaaaaaaaaaaaaaaaaaaaaaaaaaaaaaaaaaaa

SEQ ID NO: 821 - RNA, 1004 nt, synthetic construct
  misc_feature 1..1004: note Artificial____Ec(J96)-FimC(1-36)_Ec(J96)-FimC(37-241) mRNA opt1
  source 1..1004: mol_type = other RNA
aggagagtcccgcagtcggcgtccagcggctctgcttgttcgtgtgtgtgtcgttgcaggccttattcaagcttaccatgagcaacaagaacgtgaacgtccgcaagtcccaggagatcaccttctgcctgctcgccggcatcctgatgttcatggccatgatggtggcggggcgggccgaggccggcgtggccctgggggccacccgcgtcatctaccccgcgggccagaagcaggtccagctcgccgtgaccaacaacgacgagaacagcacgtacctgatccagtcctgggtggagaacgccgacggggtgaaggacggccggttcatcgtgaccccgcccctgttcgccatgaaggggaagaaggagaacaccctccgcatcctggacgccaccaacaaccagctgccccaggaccgggagagcctcttctggatgaacgtcaaggcgatcccctccatggacaagagcaagctgacggagaacaccctgcagctcgccatcatctcccgcatcaagctgtactaccggccggccaagctggccctcccgcccgaccaggcggccgagaagctgcgcttccggcgcagcgccaactccctgaccctcatcaaccccaccccctactacctgacggtgaccgagctgaacgccggcacccgggtgctcgagaacgccctggtcccgcccatgggcgagagcaccgtgaagctgccctccgacgcggggagcaacatcacgtaccgcaccatcaacgactacggcgccctcacccccaagatgaccggggtgatggagtgatgatgaggactagtccctgttcccagagcccacttttttttctttttttgaaataaaatagcctgtctttcagatctcaaaggctcttttcagagccaccaaaaaaaaaaaaaaaaaaaaaaaaaaaaaaaaaaaaaaaaaaaaaaaaaaaaaaaaaaaaaaaaaaaaaaaaaaaaaaaaaaaaaaaaaaaaaaaaaaaaa

SEQ ID NO: 822 - RNA, 950 nt, synthetic construct
  misc_feature 1..950: note = Artificial____HsIgE(1-18)_Ec(J96)-FimC(37-241) mRNA opt1
  source 1..950: mol_type = other RNA
aggagagtcccgcagtcggcgtccagcggctctgcttgttcgtgtgtgtgtcgttgcaggccttattcaagcttaccatggactggacctggatcctgttcctcgtggccgccgcgacccgcgtccacagcggcgtggccctgggggccacccgcgtcatctaccccgcgggccagaagcaggtccagctcgccgtgaccaacaacgacgagaacagcacgtacctgatccagtcctgggtggagaacgccgacggggtgaaggacggccggttcatcgtgaccccgcccctgttcgccatgaaggggaagaaggagaacaccctccgcatcctggacgccaccaacaaccagctgccccaggaccgggagagcctcttctggatgaacgtcaaggcgatcccctccatggacaagagcaagctgacggagaacaccctgcagctcgccatcatctcccgcatcaagctgtactaccggccggccaagctggccctcccgcccgaccaggcggccgagaagctgcgcttccggcgcagcgccaactccctgaccctcatcaaccccaccccctactacctgacggtgaccgagctgaacgccggcacccgggtgctcgagaacgccctggtcccgcccatgggcgagagcaccgtgaagctgccctccgacgcggggagcaacatcacgtaccgcaccatcaacgactacggcgccctcacccccaagatgaccggggtgatggagtgatgatgaggactagtccctgttcccagagcccacttttttttctttttttgaaataaaatagcctgtctttcagatctcaaaggctcttttcagagccaccaaaaaaaaaaaaaaaaaaaaaaaaaaaaaaaaaaaaaaaaaaaaaaaaaaaaaaaaaaaaaaaaaaaaaaaaaaaaaaaaaaaaaaaaaaaaaaaaaaaaa

SEQ ID NO: 823 - RNA, 1181 nt, synthetic construct
  misc_feature 1..1181: note Artificial____Ec(J96)-FimH(1-21)_Ec(J96)-FimH(22-300) mRNA opt1
  source 1..1181: mol_type = other RNA
aggagagtcccgcagtcggcgtccagcggctctgcttgttcgtgtgtgtgtcgttgcaggccttattcaagcttaccatgaagcgcgtgatcaccctgttcgccgtcctcctgatgggctggagcgtgaacgcctggtccttcgcctgcaagaccgccaacggcaccgcgatccccatcgggggcgggagcgccaacgtgtacgtcaacctggccccggtggtgaacgtcggccagaacctcgtggtggacctgtccacgcagatcttctgccacaacgactaccccgagaccatcaccgactacgtcaccctgcagcgcgggagcgcctacggcggcgtgctctccaacttcagcgggacggtgaagtactccggcagctcctaccccttccccaccaccagcgagaccccgcgggtcgtgtacaactcccgcacggacaagccctggcccgtggccctgtacctgacccccgtcagctccgccgggggcgtggcgatcaaggccgggagcctcatcgccgtgctgatcctgcggcagaccaacaactacaactccgacgacttccagttcgtctggaacatctacgcgaacaacgacgtggtggtcccgaccggcggctgcgacgtgagcgcccgcgacgtgacggtcaccctccccgactaccccgggtccgtgcccatcccgctgaccgtgtactgcgccaagagccagaacctgggctactacctctccgggaccacggccgacgccggcaacagcatcttcaccaacaccgcgtccttcagccccgcccagggcgtcggggtgcagctgacccggaacggcacgatcatccccgccaacaacaccgtcagcctgggggccgtgggcacctccgccgtgagcctcgggctgaccgcgaactacgcccgcacgggcggccaggtcaccgccgggaacgtgcagtccatcatcggcgtgaccttcgtctaccagtgatgatgaggactagtccctgttcccagagcccacttttttttctttttttgaaataaaatagcctgtctttcagatctcaaaggctcttttcagagccaccaaaaaaaaaaaaaaaaaaaaaaaaaaaaaaaaaaaaaaaaaaaaaaaaaaaaaaaaaaaaaaaaaaaaaaaaaaaaaaaaaaaaaaaaaaaaaaaaaaaaa

SEQ ID NO: 824 - RNA, 1172 nt, synthetic construct
  misc_feature 1..1172: note = Artificial____HsIgE(1-18)_Ec(J96)-FimH(22-300) mRNA opt1
  source 1..1172: mol_type = other RNA
aggagagtcccgcagtcggcgtccagcggctctgcttgttcgtgtgtgtgtcgttgcaggccttattcaagcttaccatggactggacctggatcctgttcctcgtggccgccgcgacccgcgtccacagcttcgcctgcaagaccgccaacggcaccgcgatccccatcgggggcgggagcgccaacgtgtacgtcaacctggccccggtggtgaacgtcggccagaacctcgtggtggacctgtccacgcagatcttctgccacaacgactaccccgagaccatcaccgactacgtcaccctgcagcgcgggagcgcctacggcggcgtgctctccaacttcagcgggacggtgaagtactccggcagctcctaccccttccccaccaccagcgagaccccgcgggtcgtgtacaactcccgcacggacaagccctggcccgtggccctgtacctgacccccgtcagctccgccgggggcgtggcgatcaaggccgggagcctcatcgccgtgctgatcctgcggcagaccaacaactacaactccgacgacttccagttcgtctggaacatctacgcgaacaacgacgtggtggtcccgaccggcggctgcgacgtgagcgcccgcgacgtgacggtcaccctccccgactaccccgggtccgtgcccatcccgctgaccgtgtactgcgccaagagccagaacctgggctactacctctccgggaccacggccgacgccggcaacagcatcttcaccaacaccgcgtccttcagccccgcccagggcgtcggggtgcagctgacccggaacggcacgatcatccccgccaacaacaccgtcagcctgggggccgtgggcacctccgccgtgagcctcgggctgaccgcgaactacgcccgcacgggcggccaggtcaccgccgggaacgtgcagtccatcatcggcgtgaccttcgtctaccagtgatgatgaggactagtccctgttcccagagcccacttttttttctttttttgaaataaaatagcctgtctttcagatctcaaaggctcttttcagagccaccaaaaaaaaaaaaaaaaaaaaaaaaaaaaaaaaaaaaaaaaaaaaaaaaaaaaaaaaaaaaaaaaaaaaaaaaaaaaaaaaaaaaaaaaaaaaaaaaaaaaa

SEQ ID NO: 825 - RNA, 1178 nt, synthetic construct
  misc_feature 1..1178: note = Artificial____MmIgK(1-20)_Ec(J96)-FimH(22-300) mRNA opt1
  source 1..1178: mol_type = other RNA
aggagagtcccgcagtcggcgtccagcggctctgcttgttcgtgtgtgtgtcgttgcaggccttattcaagcttaccatggagaccgacaccctgctcctgtgggtgctgctcctgtgggtccccggcagcacggggttcgcctgcaagaccgccaacggcaccgcgatccccatcgggggcgggagcgccaacgtgtacgtcaacctggccccggtggtgaacgtcggccagaacctcgtggtggacctgtccacgcagatcttctgccacaacgactaccccgagaccatcaccgactacgtcaccctgcagcgcgggagcgcctacggcggcgtgctctccaacttcagcgggacggtgaagtactccggcagctcctaccccttccccaccaccagcgagaccccgcgggtcgtgtacaactcccgcacggacaagccctggcccgtggccctgtacctgacccccgtcagctccgccgggggcgtggcgatcaaggccgggagcctcatcgccgtgctgatcctgcggcagaccaacaactacaactccgacgacttccagttcgtctggaacatctacgcgaacaacgacgtggtggtcccgaccggcggctgcgacgtgagcgcccgcgacgtgacggtcaccctccccgactaccccgggtccgtgcccatcccgctgaccgtgtactgcgccaagagccagaacctgggctactacctctccgggaccacggccgacgccggcaacagcatcttcaccaacaccgcgtccttcagccccgcccagggcgtcggggtgcagctgacccggaacggcacgatcatccccgccaacaacaccgtcagcctgggggccgtgggcacctccgccgtgagcctcgggctgaccgcgaactacgcccgcacgggcggccaggtcaccgccgggaacgtgcagtccatcatcggcgtgaccttcgtctaccagtgatgatgaggactagtccctgttcccagagcccacttttttttctttttttgaaataaaatagcctgtctttcagatctcaaaggctcttttcagagccaccaaaaaaaaaaaaaaaaaaaaaaaaaaaaaaaaaaaaaaaaaaaaaaaaaaaaaaaaaaaaaaaaaaaaaaaaaaaaaaaaaaaaaaaaaaaaaaaaaaaaa

SEQ ID NO: 826 - RNA, 1238 nt, synthetic construct
  misc_feature 1..1238: note Artificial____Ec(J96)-FimH(1-21)_Ec(J96)-FimH(22-300)_Linke r-PGDGN_Ec(J96)-FimG(24-37) mRNA opt1
  source 1..1238: mol_type = other RNA
aggagagtcccgcagtcggcgtccagcggctctgcttgttcgtgtgtgtgtcgttgcaggccttattcaagcttaccatgaagcgcgtgatcaccctgttcgccgtcctcctgatgggctggagcgtgaacgcctggtccttcgcctgcaagaccgccaacggcaccgcgatccccatcgggggcgggagcgccaacgtgtacgtcaacctggccccggtggtgaacgtcggccagaacctcgtggtggacctgtccacgcagatcttctgccacaacgactaccccgagaccatcaccgactacgtcaccctgcagcgcgggagcgcctacggcggcgtgctctccaacttcagcgggacggtgaagtactccggcagctcctaccccttccccaccaccagcgagaccccgcgggtcgtgtacaactcccgcacggacaagccctggcccgtggccctgtacctgacccccgtcagctccgccgggggcgtggcgatcaaggccgggagcctcatcgccgtgctgatcctgcggcagaccaacaactacaactccgacgacttccagttcgtctggaacatctacgcgaacaacgacgtggtggtcccgaccggcggctgcgacgtgagcgcccgcgacgtgacggtcaccctccccgactaccccgggtccgtgcccatcccgctgaccgtgtactgcgccaagagccagaacctgggctactacctctccgggaccacggccgacgccggcaacagcatcttcaccaacaccgcgtccttcagccccgcccagggcgtcggggtgcagctgacccggaacggcacgatcatccccgccaacaacaccgtcagcctgggggccgtgggcacctccgccgtgagcctcgggctgaccgcgaactacgcccgcacgggcggccaggtcaccgccgggaacgtgcagtccatcatcggcgtgaccttcgtctaccagcccggcgacgggaacgccgacgtgaccatcaccgtcaacggcaaggtggtggccaagtgatgatgaggactagtccctgttcccagagcccacttttttttctttttttgaaataaaatagcctgtctttcagatctcaaaggctcttttcagagccaccaaaaaaaaaaaaaaaaaaaaaaaaaaaaaaaaaaaaaaaaaaaaaaaaaaaaaaaaaaaaaaaaaaaaaaaaaaaaaaaaaaaaaaaaaaaaaaaaaaaaa

SEQ ID NO: 827 - RNA, 1229 nt, synthetic construct
  misc_feature 1..1229: note Artificial____HsIgE(1-18)_Ec(J96)-FimH(22-300)_Linker-PGDGN _Ec(J96)-FimG(24-37) mRNA opt1
  source 1..1229: mol_type = other RNA
aggagagtcccgcagtcggcgtccagcggctctgcttgttcgtgtgtgtgtcgttgcaggccttattcaagcttaccatggactggacctggatcctgttcctcgtggccgccgcgacccgcgtccacagcttcgcctgcaagaccgccaacggcaccgcgatccccatcgggggcgggagcgccaacgtgtacgtcaacctggccccggtggtgaacgtcggccagaacctcgtggtggacctgtccacgcagatcttctgccacaacgactaccccgagaccatcaccgactacgtcaccctgcagcgcgggagcgcctacggcggcgtgctctccaacttcagcgggacggtgaagtactccggcagctcctaccccttccccaccaccagcgagaccccgcgggtcgtgtacaactcccgcacggacaagccctggcccgtggccctgtacctgacccccgtcagctccgccgggggcgtggcgatcaaggccgggagcctcatcgccgtgctgatcctgcggcagaccaacaactacaactccgacgacttccagttcgtctggaacatctacgcgaacaacgacgtggtggtcccgaccggcggctgcgacgtgagcgcccgcgacgtgacggtcaccctccccgactaccccgggtccgtgcccatcccgctgaccgtgtactgcgccaagagccagaacctgggctactacctctccgggaccacggccgacgccggcaacagcatcttcaccaacaccgcgtccttcagccccgcccagggcgtcggggtgcagctgacccggaacggcacgatcatccccgccaacaacaccgtcagcctgggggccgtgggcacctccgccgtgagcctcgggctgaccgcgaactacgcccgcacgggcggccaggtcaccgccgggaacgtgcagtccatcatcggcgtgaccttcgtctaccagcccggcgacgggaacgccgacgtgaccatcaccgtcaacggcaaggtggtggccaagtgatgatgaggactagtccctgttcccagagcccacttttttttctttttttgaaataaaatagcctgtctttcagatctcaaaggctcttttcagagccaccaaaaaaaaaaaaaaaaaaaaaaaaaaaaaaaaaaaaaaaaaaaaaaaaaaaaaaaaaaaaaaaaaaaaaaaaaaaaaaaaaaaaaaaaaaaaaaaaaaaaa

SEQ ID NO: 828 - RNA, 1235 nt, synthetic construct
  misc_feature 1..1235: note Artificial____HsIgE(1-18)_Ec(J96)-FimH(22-300)_Linker-G4SGG _Ec(J96)-FimG(24-37) mRNA opt1
  source 1..1235: mol_type = other RNA
aggagagtcccgcagtcggcgtccagcggctctgcttgttcgtgtgtgtgtcgttgcaggccttattcaagcttaccatggactggacctggatcctgttcctcgtggccgccgcgacccgcgtccacagcttcgcctgcaagaccgccaacggcaccgcgatccccatcgggggcgggagcgccaacgtgtacgtcaacctggccccggtggtgaacgtcggccagaacctcgtggtggacctgtccacgcagatcttctgccacaacgactaccccgagaccatcaccgactacgtcaccctgcagcgcgggagcgcctacggcggcgtgctctccaacttcagcgggacggtgaagtactccggcagctcctaccccttccccaccaccagcgagaccccgcgggtcgtgtacaactcccgcacggacaagccctggcccgtggccctgtacctgacccccgtcagctccgccgggggcgtggcgatcaaggccgggagcctcatcgccgtgctgatcctgcggcagaccaacaactacaactccgacgacttccagttcgtctggaacatctacgcgaacaacgacgtggtggtcccgaccggcggctgcgacgtgagcgcccgcgacgtgacggtcaccctccccgactaccccgggtccgtgcccatcccgctgaccgtgtactgcgccaagagccagaacctgggctactacctctccgggaccacggccgacgccggcaacagcatcttcaccaacaccgcgtccttcagccccgcccagggcgtcggggtgcagctgacccggaacggcacgatcatccccgccaacaacaccgtcagcctgggggccgtgggcacctccgccgtgagcctcgggctgaccgcgaactacgcccgcacgggcggccaggtcaccgccgggaacgtgcagtccatcatcggcgtgaccttcgtctaccagggcggcggcggctccggaggcgccgacgtgaccatcaccgtcaacggcaaggtggtggccaagtgatgatgaggactagtccctgttcccagagcccacttttttttctttttttgaaataaaatagcctgtctttcagatctcaaaggctcttttcagagccaccaaaaaaaaaaaaaaaaaaaaaaaaaaaaaaaaaaaaaaaaaaaaaaaaaaaaaaaaaaaaaaaaaaaaaaaaaaaaaaaaaaaaaaaaaaaaaaaaaaaaa

SEQ ID NO: 829 - RNA, 1235 nt, synthetic construct
  misc_feature 1..1235: note Artificial____MmIgK(1-20)_Ec(J96)-FimH(22-300)_Linker-PGDGN _Ec(J96)-FimG(24-37) mRNA opt1
  source 1..1235: mol_type = other RNA
aggagagtcccgcagtcggcgtccagcggctctgcttgttcgtgtgtgtgtcgttgcaggccttattcaagcttaccatggagaccgacaccctgctcctgtgggtgctgctcctgtgggtccccggcagcacggggttcgcctgcaagaccgccaacggcaccgcgatccccatcgggggcgggagcgccaacgtgtacgtcaacctggccccggtggtgaacgtcggccagaacctcgtggtggacctgtccacgcagatcttctgccacaacgactaccccgagaccatcaccgactacgtcaccctgcagcgcgggagcgcctacggcggcgtgctctccaacttcagcgggacggtgaagtactccggcagctcctaccccttccccaccaccagcgagaccccgcgggtcgtgtacaactcccgcacggacaagccctggcccgtggccctgtacctgacccccgtcagctccgccgggggcgtggcgatcaaggccgggagcctcatcgccgtgctgatcctgcggcagaccaacaactacaactccgacgacttccagttcgtctggaacatctacgcgaacaacgacgtggtggtcccgaccggcggctgcgacgtgagcgcccgcgacgtgacggtcaccctccccgactaccccgggtccgtgcccatcccgctgaccgtgtactgcgccaagagccagaacctgggctactacctctccgggaccacggccgacgccggcaacagcatcttcaccaacaccgcgtccttcagccccgcccagggcgtcggggtgcagctgacccggaacggcacgatcatccccgccaacaacaccgtcagcctgggggccgtgggcacctccgccgtgagcctcgggctgaccgcgaactacgcccgcacgggcggccaggtcaccgccgggaacgtgcagtccatcatcggcgtgaccttcgtctaccagcccggcgacgggaacgccgacgtgaccatcaccgtcaacggcaaggtggtggccaagtgatgatgaggactagtccctgttcccagagcccacttttttttctttttttgaaataaaatagcctgtctttcagatctcaaaggctcttttcagagccaccaaaaaaaaaaaaaaaaaaaaaaaaaaaaaaaaaaaaaaaaaaaaaaaaaaaaaaaaaaaaaaaaaaaaaaaaaaaaaaaaaaaaaaaaaaaaaaaaaaaaa

SEQ ID NO: 830 - RNA, 1235 nt, synthetic construct
  misc_feature 1..1235: note Artificial____MmIgK(1-20)_Ec(536)-FimH(22-300)_Linker-PGDGN _Ec(J96)-FimG(24-37) mRNA opt1
  source 1..1235: mol_type = other RNA
aggagagtcccgcagtcggcgtccagcggctctgcttgttcgtgtgtgtgtcgttgcaggccttattcaagcttaccatggagaccgacaccctgctcctgtgggtgctgctcctgtgggtccccggcagcacggggttcgcctgcaagaccgccaacggcaccgcgatccccatcgggggcgggagcgccaacgtgtacgtcaacctggccccggccgtgaacgtcggccagaacctcgtggtggacctgtccacgcagatcttctgccacaacgactaccccgagaccatcaccgactacgtcaccctgcagcgcgggagcgcctacggcggcgtgctctccagcttcagcgggacggtgaagtacaacggcagctcctaccccttccccaccaccagcgagaccccgcgggtcgtgtacaactcccgcacggacaagccctggcccgtggccctgtacctgacccccgtcagctccgccgggggcgtggcgatcaaggccgggagcctcatcgccgtgctgatcctgcggcagaccaacaactacaactccgacgacttccagttcgtctggaacatctacgcgaacaacgacgtggtggtcccgaccggcggctgcgacgtgagcgcccgcgacgtgacggtcaccctccccgactaccccgggtccgtgcccatcccgctgaccgtgtactgcgccaagagccagaacctgggctactacctctccgggaccacggccgacgccggcaacagcatcttcaccaacaccgcgtccttcagccccgcccagggcgtcggggtgcagctgacccggaacggcacgatcatccccgccaacaacaccgtcagcctgggggccgtgggcacctccgccgtgagcctcgggctgaccgcgaactacgcccgcacgggcggccaggtcaccgccgggaacgtgcagtccatcatcggcgtgaccttcgtctaccagcccggcgacgggaacgccgacgtgaccatcaccgtcaacggcaaggtggtggccaagtgatgatgaggactagtccctgttcccagagcccacttttttttctttttttgaaataaaatagcctgtctttcagatctcaaaggctcttttcagagccaccaaaaaaaaaaaaaaaaaaaaaaaaaaaaaaaaaaaaaaaaaaaaaaaaaaaaaaaaaaaaaaaaaaaaaaaaaaaaaaaaaaaaaaaaaaaaaaaaaaaaa

SEQ ID NO: 831 - RNA, 1259 nt, synthetic construct
  misc_feature 1..1259: note Artificial____HsIgE(1-18)_Ec(J96)-FimH(22-300)_Linker-(G4S) 3_Ec(J96)-FimC(135-148) mRNA opt1
  source 1..1259: mol_type = other RNA
aggagagtcccgcagtcggcgtccagcggctctgcttgttcgtgtgtgtgtcgttgcaggccttattcaagcttaccatggactggacctggatcctgttcctcgtggccgccgcgacccgcgtccacagcttcgcctgcaagaccgccaacggcaccgcgatccccatcgggggcgggagcgccaacgtgtacgtcaacctggccccggtggtgaacgtcggccagaacctcgtggtggacctgtccacgcagatcttctgccacaacgactaccccgagaccatcaccgactacgtcaccctgcagcgcgggagcgcctacggcggcgtgctctccaacttcagcgggacggtgaagtactccggcagctcctaccccttccccaccaccagcgagaccccgcgggtcgtgtacaactcccgcacggacaagccctggcccgtggccctgtacctgacccccgtcagctccgccgggggcgtggcgatcaaggccgggagcctcatcgccgtgctgatcctgcggcagaccaacaactacaactccgacgacttccagttcgtctggaacatctacgcgaacaacgacgtggtggtcccgaccggcggctgcgacgtgagcgcccgcgacgtgacggtcaccctccccgactaccccgggtccgtgcccatcccgctgaccgtgtactgcgccaagagccagaacctgggctactacctctccgggaccacggccgacgccggcaacagcatcttcaccaacaccgcgtccttcagccccgcccagggcgtcggggtgcagctgacccggaacggcacgatcatccccgccaacaacaccgtcagcctgggggccgtgggcacctccgccgtgagcctcgggctgaccgcgaactacgcccgcacgggcggccaggtcaccgccgggaacgtgcagtccatcatcggcgtgaccttcgtctaccagggcgggggcgggagcggcgggggcggctccgggggcgggggcagcacggagaacaccctgcagctcgccatcatctcccgcatcaagtgatgatgaggactagtccctgttcccagagcccacttttttttctttttttgaaataaaatagcctgtctttcagatctcaaaggctcttttcagagccaccaaaaaaaaaaaaaaaaaaaaaaaaaaaaaaaaaaaaaaaaaaaaaaaaaaaaaaaaaaaaaaaaaaaaaaaaaaaaaaaaaaaaaaaaaaaaaaaaaaaaa

SEQ ID NO: 832 - RNA, 1682 nt, synthetic construct
  misc_feature 1..1682: note Artificial____LumSynth(1-154_C37A_N102D)_Linker(GGS)4-GGG_E c(J96)-FimH(22-300)_Linker-PGDGN_Ec(J96)-FimG(24-37) mRNA opt1
  source 1..1682: mol_type = other RNA
aggagagtcccgcagtcggcgtccagcggctctgcttgttcgtgtgtgtgtcgttgcaggccttattcaagcttaccatgcagatctacgagggcaagctgaccgccgaggggctccgcttcggcatcgtggccagccggttcaaccacgcgctggtcgaccgcctggtggagggggccatcgacgccatcgtgcggcacggcgggcgcgaggaggacatcaccctcgtccgggtgcccggctcctgggagatcccggtggccgccggcgagctggcccgcaaggaggacatcgacgcggtcatcgccatcggggtgctgatccggggcgccacgccccacttcgactacatcgccagcgaggtgtccaaggggctcgcggacctgagcctggagctccgcaagcccatcaccttcggcgtcatcaccgccgacaccctggagcaggccatcgagcgggccgggacgaagcacggcaacaagggctgggaggccgcgctgtccgccatcgagatggccaacctcttcaagagcctgcgcggcgggagcggcgggtccggcgggagcggcggctccgggggcgggttcgcctgcaagaccgccaacggcaccgcgatccccatcgggggcgggagcgccaacgtgtacgtcaacctggccccggtggtgaacgtcggccagaacctcgtggtggacctgtccacgcagatcttctgccacaacgactaccccgagaccatcaccgactacgtcaccctgcagcgcgggagcgcctacggcggcgtgctctccaacttcagcgggacggtgaagtactccggcagctcctaccccttccccaccaccagcgagaccccgcgggtcgtgtacaactcccgcacggacaagccctggcccgtggccctgtacctgacccccgtcagctccgccgggggcgtggcgatcaaggccgggagcctcatcgccgtgctgatcctgcggcagaccaacaactacaactccgacgacttccagttcgtctggaacatctacgcgaacaacgacgtggtggtcccgaccggcggctgcgacgtgagcgcccgcgacgtgacggtcaccctccccgactaccccgggtccgtgcccatcccgctgaccgtgtactgcgccaagagccagaacctgggctactacctctccgggaccacggccgacgccggcaacagcatcttcaccaacaccgcgtccttcagccccgcccagggcgtcggggtgcagctgacccggaacggcacgatcatccccgccaacaacaccgtcagcctgggggccgtgggcacctccgccgtgagcctcgggctgaccgcgaactacgcccgcacgggcggccaggtcaccgccgggaacgtgcagtccatcatcggcgtgaccttcgtctaccagcccggcgacgggaacgccgacgtgaccatcaccgtcaacggcaaggtggtggccaagtgatgatgaggactagtccctgttcccagagcccacttttttttctttttttgaaataaaatagcctgtctttcagatctcaaaggctcttttcagagccaccaaaaaaaaaaaaaaaaaaaaaaaaaaaaaaaaaaaaaaaaaaaaaaaaaaaaaaaaaaaaaaaaaaaaaaaaaaaaaaaaaaaaaaaaaaaaaaaaaaaaa

SEQ ID NO: 833 - RNA, 1700 nt, synthetic construct
  misc_feature 1..1700: note Artificial____HsIgE(1-18)_Ec(J96)-FimH(22-300)_Linker-PGDGN _Ec(J96)-FimG(24-37)_Linker-SGG_LumSynth(1-154_C37A_N102D) mRNA opt1
  source 1..1700: mol_type = other RNA
aggagagtcccgcagtcggcgtccagcggctctgcttgttcgtgtgtgtgtcgttgcaggccttattcaagcttaccatggactggacctggatcctgttcctcgtggccgccgcgacccgcgtccacagcttcgcctgcaagaccgccaacggcaccgcgatccccatcgggggcgggagcgccaacgtgtacgtcaacctggccccggtggtgaacgtcggccagaacctcgtggtggacctgtccacgcagatcttctgccacaacgactaccccgagaccatcaccgactacgtcaccctgcagcgcgggagcgcctacggcggcgtgctctccaacttcagcgggacggtgaagtactccggcagctcctaccccttccccaccaccagcgagaccccgcgggtcgtgtacaactcccgcacggacaagccctggcccgtggccctgtacctgacccccgtcagctccgccgggggcgtggcgatcaaggccgggagcctcatcgccgtgctgatcctgcggcagaccaacaactacaactccgacgacttccagttcgtctggaacatctacgcgaacaacgacgtggtggtcccgaccggcggctgcgacgtgagcgcccgcgacgtgacggtcaccctccccgactaccccgggtccgtgcccatcccgctgaccgtgtactgcgccaagagccagaacctgggctactacctctccgggaccacggccgacgccggcaacagcatcttcaccaacaccgcgtccttcagccccgcccagggcgtcggggtgcagctgacccggaacggcacgatcatccccgccaacaacaccgtcagcctgggggccgtgggcacctccgccgtgagcctcgggctgaccgcgaactacgcccgcacgggcggccaggtcaccgccgggaacgtgcagtccatcatcggcgtgaccttcgtctaccagcccggcgacgggaacgccgacgtgaccatcaccgtcaacggcaaggtggtggccaagagcggcgggatgcagatctacgagggcaagctgaccgccgaggggctccgcttcggcatcgtggccagccggttcaaccacgcgctggtcgaccgcctggtggagggggccatcgacgccatcgtgcggcacggcgggcgcgaggaggacatcaccctcgtccgggtgcccggctcctgggagatcccggtggccgccggcgagctggcccgcaaggaggacatcgacgcggtcatcgccatcggggtgctgatccggggcgccacgccccacttcgactacatcgccagcgaggtgtccaaggggctcgcggacctgagcctggagctccgcaagcccatcaccttcggcgtcatcaccgccgacaccctggagcaggccatcgagcgggccgggacgaagcacggcaacaagggctgggaggccgcgctgtccgccatcgagatggccaacctcttcaagagcctgcgctgatgatgaggactagtccctgttcccagagcccacttttttttctttttttgaaataaaatagcctgtctttcagatctcaaaggctcttttcagagccaccaaaaaaaaaaaaaaaaaaaaaaaaaaaaaaaaaaaaaaaaaaaaaaaaaaaaaaaaaaaaaaaaaaaaaaaaaaaaaaaaaaaaaaaaaaaaaaaaaaaaa

SEQ ID NO: 834 - RNA, 1727 nt, synthetic construct
  misc_feature 1..1727: note Artificial____HsIgE(1-18)_Ec(J96)-FimH(22-300)_Linker-PGDGN _Ec(J96)-FimG(24-37)_Linker-SGG_Ferritin(5-167_N19Q) mRNA opt1
  source 1..1727: mol_type = other RNA
aggagagtcccgcagtcggcgtccagcggctctgcttgttcgtgtgtgtgtcgttgcaggccttattcaagcttaccatggactggacctggatcctgttcctcgtggccgccgcgacccgcgtccacagcttcgcctgcaagaccgccaacggcaccgcgatccccatcgggggcgggagcgccaacgtgtacgtcaacctggccccggtggtgaacgtcggccagaacctcgtggtggacctgtccacgcagatcttctgccacaacgactaccccgagaccatcaccgactacgtcaccctgcagcgcgggagcgcctacggcggcgtgctctccaacttcagcgggacggtgaagtactccggcagctcctaccccttccccaccaccagcgagaccccgcgggtcgtgtacaactcccgcacggacaagccctggcccgtggccctgtacctgacccccgtcagctccgccgggggcgtggcgatcaaggccgggagcctcatcgccgtgctgatcctgcggcagaccaacaactacaactccgacgacttccagttcgtctggaacatctacgcgaacaacgacgtggtggtcccgaccggcggctgcgacgtgagcgcccgcgacgtgacggtcaccctccccgactaccccgggtccgtgcccatcccgctgaccgtgtactgcgccaagagccagaacctgggctactacctctccgggaccacggccgacgccggcaacagcatcttcaccaacaccgcgtccttcagccccgcccagggcgtcggggtgcagctgacccggaacggcacgatcatccccgccaacaacaccgtcagcctgggggccgtgggcacctccgccgtgagcctcgggctgaccgcgaactacgcccgcacgggcggccaggtcaccgccgggaacgtgcagtccatcatcggcgtgaccttcgtctaccagcccggcgacgggaacgccgacgtgaccatcaccgtcaacggcaaggtggtggccaagagcggcggggacatcatcaagctcctgaacgagcaggtcaacaaggagatgcagtccagcaacctgtacatgtccatgagctcctggtgctacacccacagcctcgacggcgccgggctgttcctgttcgaccacgccgcggaggagtacgagcacgccaagaagctcatcatcttcctgaacgagaacaacgtgcccgtgcagctgacctccatcagcgccccggagcacaagttcgagggcctcacgcagatcttccagaaggcctacgagcacgagcagcacatctccgagagcatcaacaacatcgtggaccacgccatcaagtccaaggaccacgcgaccttcaacttcctgcagtggtacgtcgccgagcagcacgaggaggaggtgctgttcaaggacatcctcgacaagatcgagctgatcgggaacgagaaccacggcctgtacctcgccgaccagtacgtgaaggggatcgccaagagccgcaagtcctgatgatgaggactagtccctgttcccagagcccacttttttttctttttttgaaataaaatagcctgtctttcagatctcaaaggctcttttcagagccaccaaaaaaaaaaaaaaaaaaaaaaaaaaaaaaaaaaaaaaaaaaaaaaaaaaaaaaaaaaaaaaaaaaaaaaaaaaaaaaaaaaaaaaaaaaaaaaaaaaaaa

SEQ ID NO: 835 - RNA, 1757 nt, synthetic construct
  misc_feature 1..1757: note Artificial____MmIgK(1-20)_Ec(J96)-FimH(22-300)_Linker-PGDGN _Ec(J96)-FimG(24-37)_Linker-(GGS)4_Ferritin(5-166) mRNA opt1
  source 1..1757: mol_type = other RNA
aggagagtcccgcagtcggcgtccagcggctctgcttgttcgtgtgtgtgtcgttgcaggccttattcaagcttaccatggagaccgacaccctgctcctgtgggtgctgctcctgtgggtccccggcagcacggggttcgcctgcaagaccgccaacggcaccgcgatccccatcgggggcgggagcgccaacgtgtacgtcaacctggccccggtggtgaacgtcggccagaacctcgtggtggacctgtccacgcagatcttctgccacaacgactaccccgagaccatcaccgactacgtcaccctgcagcgcgggagcgcctacggcggcgtgctctccaacttcagcgggacggtgaagtactccggcagctcctaccccttccccaccaccagcgagaccccgcgggtcgtgtacaactcccgcacggacaagccctggcccgtggccctgtacctgacccccgtcagctccgccgggggcgtggcgatcaaggccgggagcctcatcgccgtgctgatcctgcggcagaccaacaactacaactccgacgacttccagttcgtctggaacatctacgcgaacaacgacgtggtggtcccgaccggcggctgcgacgtgagcgcccgcgacgtgacggtcaccctccccgactaccccgggtccgtgcccatcccgctgaccgtgtactgcgccaagagccagaacctgggctactacctctccgggaccacggccgacgccggcaacagcatcttcaccaacaccgcgtccttcagccccgcccagggcgtcggggtgcagctgacccggaacggcacgatcatccccgccaacaacaccgtcagcctgggggccgtgggcacctccgccgtgagcctcgggctgaccgcgaactacgcccgcacgggcggccaggtcaccgccgggaacgtgcagtccatcatcggcgtgaccttcgtctaccagcccggcgacgggaacgccgacgtgaccatcaccgtcaacggcaaggtggtggccaagggcgggagcggcgggtccggcgggagcggcggctccgacatcatcaagctcctgaacgagcaggtcaacaaggagatgaactccagcaacctgtacatgtccatgagctcctggtgctacacccacagcctcgacggcgccgggctgttcctgttcgaccacgccgcggaggagtacgagcacgccaagaagctcatcatcttcctgaacgagaacaacgtgcccgtgcagctgacctccatcagcgccccggagcacaagttcgagggcctcacgcagatcttccagaaggcctacgagcacgagcagcacatctccgagagcatcaacaacatcgtggaccacgccatcaagtccaaggaccacgcgaccttcaacttcctgcagtggtacgtcgccgagcagcacgaggaggaggtgctgttcaaggacatcctcgacaagatcgagctgatcgggaacgagaaccacggcctgtacctcgccgaccagtacgtgaaggggatcgccaagagccgcaagtgatgatgaggactagtccctgttcccagagcccacttttttttctttttttgaaataaaatagcctgtctttcagatctcaaaggctcttttcagagccaccaaaaaaaaaaaaaaaaaaaaaaaaaaaaaaaaaaaaaaaaaaaaaaaaaaaaaaaaaaaaaaaaaaaaaaaaaaaaaaaaaaaaaaaaaaaaaaaaaaaaa

SEQ ID NO: 836 - RNA, 1400 nt, synthetic construct
  misc_feature 1..1400: note Artificial____HsIgE(1-18)_Ec(J96)-FimH(22-300)_Linker-PGDGN _Ec(J96)-FimG(24-37)_TMdomain-HA(510-566) mRNA opt1
  source 1..1400: mol_type = other RNA
aggagagtcccgcagtcggcgtccagcggctctgcttgttcgtgtgtgtgtcgttgcaggccttattcaagcttaccatggactggacctggatcctgttcctcgtggccgccgcgacccgcgtccacagcttcgcctgcaagaccgccaacggcaccgcgatccccatcgggggcgggagcgccaacgtgtacgtcaacctggccccggtggtgaacgtcggccagaacctcgtggtggacctgtccacgcagatcttctgccacaacgactaccccgagaccatcaccgactacgtcaccctgcagcgcgggagcgcctacggcggcgtgctctccaacttcagcgggacggtgaagtactccggcagctcctaccccttccccaccaccagcgagaccccgcgggtcgtgtacaactcccgcacggacaagccctggcccgtggccctgtacctgacccccgtcagctccgccgggggcgtggcgatcaaggccgggagcctcatcgccgtgctgatcctgcggcagaccaacaactacaactccgacgacttccagttcgtctggaacatctacgcgaacaacgacgtggtggtcccgaccggcggctgcgacgtgagcgcccgcgacgtgacggtcaccctccccgactaccccgggtccgtgcccatcccgctgaccgtgtactgcgccaagagccagaacctgggctactacctctccgggaccacggccgacgccggcaacagcatcttcaccaacaccgcgtccttcagccccgcccagggcgtcggggtgcagctgacccggaacggcacgatcatccccgccaacaacaccgtcagcctgggggccgtgggcacctccgccgtgagcctcgggctgaccgcgaactacgcccgcacgggcggccaggtcaccgccgggaacgtgcagtccatcatcggcgtgaccttcgtctaccagcccggcgacgggaacgccgacgtgaccatcaccgtcaacggcaaggtggtggccaaggccaagctgaaccgcgaggagatcgacggcgtgaagctcgagtccacgcggatctaccagatcctggcgatctacagcaccgtcgccagctccctggtgctcgtggtcagcctgggggccatctccttctggatgtgcagcaacggctccctgcagtgccgcatctgcatctgatgatgaggactagtccctgttcccagagcccacttttttttctttttttgaaataaaatagcctgtctttcagatctcaaaggctcttttcagagccaccaaaaaaaaaaaaaaaaaaaaaaaaaaaaaaaaaaaaaaaaaaaaaaaaaaaaaaaaaaaaaaaaaaaaaaaaaaaaaaaaaaaaaaaaaaaaaaaaaaaaa

SEQ ID NO: 837 - RNA, 1733 nt, synthetic construct
  misc_feature 1..1733: note Artificial____HsIgE(1-18)_LumSynth(1-154_C37A_N102D)_Linker (GGS)4-GGG_Ec(J96)-FimH(22-300)_Linker-PGDGN_Ec(J96)-FimG(2 4-37) mRNA opt1
  source 1..1733: mol_type = other RNA
aggagagtcccgcagtcggcgtccagcggctctgcttgttcgtgtgtgtgtcgttgcaggccttattcaagcttaccatggactggacctggatcctgttcctcgtggccgccgcgacccgcgtccacagccagatctacgagggcaagctgaccgccgaggggctccgcttcggcatcgtggccagccggttcaaccacgcgctggtcgaccgcctggtggagggggccatcgacgccatcgtgcggcacggcgggcgcgaggaggacatcaccctcgtccgggtgcccggctcctgggagatcccggtggccgccggcgagctggcccgcaaggaggacatcgacgcggtcatcgccatcggggtgctgatccggggcgccacgccccacttcgactacatcgccagcgaggtgtccaaggggctcgcggacctgagcctggagctccgcaagcccatcaccttcggcgtcatcaccgccgacaccctggagcaggccatcgagcgggccgggacgaagcacggcaacaagggctgggaggccgcgctgtccgccatcgagatggccaacctcttcaagagcctgcgcggcgggagcggcgggtccggcgggagcggcggctccgggggcgggttcgcctgcaagaccgccaacggcaccgcgatccccatcgggggcgggagcgccaacgtgtacgtcaacctggccccggtggtgaacgtcggccagaacctcgtggtggacctgtccacgcagatcttctgccacaacgactaccccgagaccatcaccgactacgtcaccctgcagcgcgggagcgcctacggcggcgtgctctccaacttcagcgggacggtgaagtactccggcagctcctaccccttccccaccaccagcgagaccccgcgggtcgtgtacaactcccgcacggacaagccctggcccgtggccctgtacctgacccccgtcagctccgccgggggcgtggcgatcaaggccgggagcctcatcgccgtgctgatcctgcggcagaccaacaactacaactccgacgacttccagttcgtctggaacatctacgcgaacaacgacgtggtggtcccgaccggcggctgcgacgtgagcgcccgcgacgtgacggtcaccctccccgactaccccgggtccgtgcccatcccgctgaccgtgtactgcgccaagagccagaacctgggctactacctctccgggaccacggccgacgccggcaacagcatcttcaccaacaccgcgtccttcagccccgcccagggcgtcggggtgcagctgacccggaacggcacgatcatccccgccaacaacaccgtcagcctgggggccgtgggcacctccgccgtgagcctcgggctgaccgcgaactacgcccgcacgggcggccaggtcaccgccgggaacgtgcagtccatcatcggcgtgaccttcgtctaccagcccggcgacgggaacgccgacgtgaccatcaccgtcaacggcaaggtggtggccaagtgatgatgaggactagtccctgttcccagagcccacttttttttctttttttgaaataaaatagcctgtctttcagatctcaaaggctcttttcagagccaccaaaaaaaaaaaaaaaaaaaaaaaaaaaaaaaaaaaaaaaaaaaaaaaaaaaaaaaaaaaaaaaaaaaaaaaaaaaaaaaaaaaaaaaaaaaaaaaaaaaaa

SEQ ID NO: 838 - RNA, 1700 nt, synthetic construct
  misc_feature 1..1700: note Artificial____HsIgE(1-18)_Ec(J96)-FimH(22-300_N28S_N91S_N24 9Q)_Linker-PGDGN_Ec(J96)-FimG(24-37)_Linker-SGG_LumSynth(1- 154_C37A_N102D) mRNA opt1
  source 1..1700: mol_type = other RNA
aggagagtcccgcagtcggcgtccagcggctctgcttgttcgtgtgtgtgtcgttgcaggccttattcaagcttaccatggactggacctggatcctgttcctcgtggccgccgcgacccgcgtccacagcttcgcctgcaagaccgccagcggcaccgcgatccccatcgggggcgggagcgccaacgtgtacgtcaacctggccccggtggtgaacgtcggccagaacctcgtggtggacctgtccacgcagatcttctgccacaacgactaccccgagaccatcaccgactacgtcaccctgcagcgcgggagcgcctacggcggcgtgctctccagcttcagcgggacggtgaagtactccggcagctcctaccccttccccaccaccagcgagaccccgcgggtcgtgtacaactcccgcacggacaagccctggcccgtggccctgtacctgacccccgtcagctccgccgggggcgtggcgatcaaggccgggagcctcatcgccgtgctgatcctgcggcagaccaacaactacaactccgacgacttccagttcgtctggaacatctacgcgaacaacgacgtggtggtcccgaccggcggctgcgacgtgagcgcccgcgacgtgacggtcaccctccccgactaccccgggtccgtgcccatcccgctgaccgtgtactgcgccaagagccagaacctgggctactacctctccgggaccacggccgacgccggcaacagcatcttcaccaacaccgcgtccttcagccccgcccagggcgtcggggtgcagctgacccggcagggcacgatcatccccgccaacaacaccgtcagcctgggggccgtgggcacctccgccgtgagcctcgggctgaccgcgaactacgcccgcacgggcggccaggtcaccgccgggaacgtgcagtccatcatcggcgtgaccttcgtctaccagcccggcgacgggaacgccgacgtgaccatcaccgtcaacggcaaggtggtggccaagagcggcgggatgcagatctacgagggcaagctgaccgccgaggggctccgcttcggcatcgtggccagccggttcaaccacgcgctggtcgaccgcctggtggagggggccatcgacgccatcgtgcggcacggcgggcgcgaggaggacatcaccctcgtccgggtgcccggctcctgggagatcccggtggccgccggcgagctggcccgcaaggaggacatcgacgcggtcatcgccatcggggtgctgatccggggcgccacgccccacttcgactacatcgccagcgaggtgtccaaggggctcgcggacctgagcctggagctccgcaagcccatcaccttcggcgtcatcaccgccgacaccctggagcaggccatcgagcgggccgggacgaagcacggcaacaagggctgggaggccgcgctgtccgccatcgagatggccaacctcttcaagagcctgcgctgatgatgaggactagtccctgttcccagagcccacttttttttctttttttgaaataaaatagcctgtctttcagatctcaaaggctcttttcagagccaccaaaaaaaaaaaaaaaaaaaaaaaaaaaaaaaaaaaaaaaaaaaaaaaaaaaaaaaaaaaaaaaaaaaaaaaaaaaaaaaaaaaaaaaaaaaaaaaaaaaaa

SEQ ID NO: 839 - RNA, 1700 nt, synthetic construct
  misc_feature 1..1700: note Artificial____HsIgE(1-18)_Ec(J96)-FimH(22-300_N28S_N91S_N24 9Q_N256D)_Linker-PGDGN_Ec(J96)-FimG(24-37)_Linker-SGG_LumSy nth(1-154_C37A_N102D) mRNA opt1
  source 1..1700: mol_type = other RNA
aggagagtcccgcagtcggcgtccagcggctctgcttgttcgtgtgtgtgtcgttgcaggccttattcaagcttaccatggactggacctggatcctgttcctcgtggccgccgcgacccgcgtccacagcttcgcctgcaagaccgccagcggcaccgcgatccccatcgggggcgggagcgccaacgtgtacgtcaacctggccccggtggtgaacgtcggccagaacctcgtggtggacctgtccacgcagatcttctgccacaacgactaccccgagaccatcaccgactacgtcaccctgcagcgcgggagcgcctacggcggcgtgctctccagcttcagcgggacggtgaagtactccggcagctcctaccccttccccaccaccagcgagaccccgcgggtcgtgtacaactcccgcacggacaagccctggcccgtggccctgtacctgacccccgtcagctccgccgggggcgtggcgatcaaggccgggagcctcatcgccgtgctgatcctgcggcagaccaacaactacaactccgacgacttccagttcgtctggaacatctacgcgaacaacgacgtggtggtcccgaccggcggctgcgacgtgagcgcccgcgacgtgacggtcaccctccccgactaccccgggtccgtgcccatcccgctgaccgtgtactgcgccaagagccagaacctgggctactacctctccgggaccacggccgacgccggcaacagcatcttcaccaacaccgcgtccttcagccccgcccagggcgtcggggtgcagctgacccggcagggcacgatcatccccgccgacaacaccgtcagcctgggggccgtgggcacctccgccgtgagcctcgggctgaccgcgaactacgcccgcacgggcggccaggtcaccgccgggaacgtgcagtccatcatcggcgtgaccttcgtctaccagcccggcgacgggaacgccgacgtgaccatcaccgtcaacggcaaggtggtggccaagagcggcgggatgcagatctacgagggcaagctgaccgccgaggggctccgcttcggcatcgtggccagccggttcaaccacgcgctggtcgaccgcctggtggagggggccatcgacgccatcgtgcggcacggcgggcgcgaggaggacatcaccctcgtccgggtgcccggctcctgggagatcccggtggccgccggcgagctggcccgcaaggaggacatcgacgcggtcatcgccatcggggtgctgatccggggcgccacgccccacttcgactacatcgccagcgaggtgtccaaggggctcgcggacctgagcctggagctccgcaagcccatcaccttcggcgtcatcaccgccgacaccctggagcaggccatcgagcgggccgggacgaagcacggcaacaagggctgggaggccgcgctgtccgccatcgagatggccaacctcttcaagagcctgcgctgatgatgaggactagtccctgttcccagagcccacttttttttctttttttgaaataaaatagcctgtctttcagatctcaaaggctcttttcagagccaccaaaaaaaaaaaaaaaaaaaaaaaaaaaaaaaaaaaaaaaaaaaaaaaaaaaaaaaaaaaaaaaaaaaaaaaaaaaaaaaaaaaaaaaaaaaaaaaaaaaaa

SEQ ID NO: 840 - RNA, 1700 nt, synthetic construct
  misc_feature 1..1700: note Artificial____HsIgE(1-18)_Ec(J96)-FimH(22-300_N28S_V48C_L55 C_N91S_N249Q)_Linker-PGDGN_Ec(J96)-FimG(24-37)_Linker-SGG_L umSynth(1-154_C37A_N102D) mRNA opt1
  source 1..1700: mol_type = other RNA
aggagagtcccgcagtcggcgtccagcggctctgcttgttcgtgtgtgtgtcgttgcaggccttattcaagcttaccatggactggacctggatcctgttcctcgtggccgccgcgacccgcgtccacagcttcgcctgcaagaccgccagcggcaccgcgatccccatcgggggcgggagcgccaacgtgtacgtcaacctggccccgtgcgtgaacgtcggccagaactgcgtggtggacctgtccacgcagatcttctgccacaacgactaccccgagaccatcaccgactacgtcaccctgcagcgcgggagcgcctacggcggcgtgctctccagcttcagcgggacggtgaagtactccggcagctcctaccccttccccaccaccagcgagaccccgcgggtcgtgtacaactcccgcacggacaagccctggcccgtggccctgtacctgacccccgtcagctccgccgggggcgtggcgatcaaggccgggagcctcatcgccgtgctgatcctgcggcagaccaacaactacaactccgacgacttccagttcgtctggaacatctacgcgaacaacgacgtggtggtcccgaccggcggctgcgacgtgagcgcccgcgacgtgacggtcaccctccccgactaccccgggtccgtgcccatcccgctgaccgtgtactgcgccaagagccagaacctgggctactacctctccgggaccacggccgacgccggcaacagcatcttcaccaacaccgcgtccttcagccccgcccagggcgtcggggtgcagctgacccggcagggcacgatcatccccgccaacaacaccgtcagcctgggggccgtgggcacctccgccgtgagcctcgggctgaccgcgaactacgcccgcacgggcggccaggtcaccgccgggaacgtgcagtccatcatcggcgtgaccttcgtctaccagcccggcgacgggaacgccgacgtgaccatcaccgtcaacggcaaggtggtggccaagagcggcgggatgcagatctacgagggcaagctgaccgccgaggggctccgcttcggcatcgtggccagccggttcaaccacgcgctggtcgaccgcctggtggagggggccatcgacgccatcgtgcggcacggcgggcgcgaggaggacatcaccctcgtccgggtgcccggctcctgggagatcccggtggccgccggcgagctggcccgcaaggaggacatcgacgcggtcatcgccatcggggtgctgatccggggcgccacgccccacttcgactacatcgccagcgaggtgtccaaggggctcgcggacctgagcctggagctccgcaagcccatcaccttcggcgtcatcaccgccgacaccctggagcaggccatcgagcgggccgggacgaagcacggcaacaagggctgggaggccgcgctgtccgccatcgagatggccaacctcttcaagagcctgcgctgatgatgaggactagtccctgttcccagagcccacttttttttctttttttgaaataaaatagcctgtctttcagatctcaaaggctcttttcagagccaccaaaaaaaaaaaaaaaaaaaaaaaaaaaaaaaaaaaaaaaaaaaaaaaaaaaaaaaaaaaaaaaaaaaaaaaaaaaaaaaaaaaaaaaaaaaaaaaaaaaaa

SEQ ID NO: 841 - RNA, 1700 nt, synthetic construct
  misc_feature 1..1700: note Artificial____HsIgE(1-18)_Ec(J96)-FimH(22-300_F165V)_Linker -PGDGN_Ec(J96)-FimG(24-37)_Linker-SGG_LumSynth(1-154_C37A_N 102D) mRNA opt1
  source 1..1700: mol_type = other RNA
aggagagtcccgcagtcggcgtccagcggctctgcttgttcgtgtgtgtgtcgttgcaggccttattcaagcttaccatggactggacctggatcctgttcctcgtggccgccgcgacccgcgtccacagcttcgcctgcaagaccgccaacggcaccgcgatccccatcgggggcgggagcgccaacgtgtacgtcaacctggccccggtggtgaacgtcggccagaacctcgtggtggacctgtccacgcagatcttctgccacaacgactaccccgagaccatcaccgactacgtcaccctgcagcgcgggagcgcctacggcggcgtgctctccaacttcagcgggacggtgaagtactccggcagctcctaccccttccccaccaccagcgagaccccgcgggtcgtgtacaactcccgcacggacaagccctggcccgtggccctgtacctgacccccgtcagctccgccgggggcgtggcgatcaaggccgggagcctcatcgccgtgctgatcctgcggcagaccaacaactacaactccgacgacttccaggtggtctggaacatctacgcgaacaacgacgtggtggtcccgaccggcggctgcgacgtgagcgcccgcgacgtgacggtcaccctccccgactaccccgggtccgtgcccatcccgctgaccgtgtactgcgccaagagccagaacctgggctactacctctccgggaccacggccgacgccggcaacagcatcttcaccaacaccgcgtccttcagccccgcccagggcgtcggggtgcagctgacccggaacggcacgatcatccccgccaacaacaccgtcagcctgggggccgtgggcacctccgccgtgagcctcgggctgaccgcgaactacgcccgcacgggcggccaggtcaccgccgggaacgtgcagtccatcatcggcgtgaccttcgtctaccagcccggcgacgggaacgccgacgtgaccatcaccgtcaacggcaaggtggtggccaagagcggcgggatgcagatctacgagggcaagctgaccgccgaggggctccgcttcggcatcgtggccagccggttcaaccacgcgctggtcgaccgcctggtggagggggccatcgacgccatcgtgcggcacggcgggcgcgaggaggacatcaccctcgtccgggtgcccggctcctgggagatcccggtggccgccggcgagctggcccgcaaggaggacatcgacgcggtcatcgccatcggggtgctgatccggggcgccacgccccacttcgactacatcgccagcgaggtgtccaaggggctcgcggacctgagcctggagctccgcaagcccatcaccttcggcgtcatcaccgccgacaccctggagcaggccatcgagcgggccgggacgaagcacggcaacaagggctgggaggccgcgctgtccgccatcgagatggccaacctcttcaagagcctgcgctgatgatgaggactagtccctgttcccagagcccacttttttttctttttttgaaataaaatagcctgtctttcagatctcaaaggctcttttcagagccaccaaaaaaaaaaaaaaaaaaaaaaaaaaaaaaaaaaaaaaaaaaaaaaaaaaaaaaaaaaaaaaaaaaaaaaaaaaaaaaaaaaaaaaaaaaaaaaaaaaaaa

SEQ ID NO: 842 - RNA, 1727 nt, synthetic construct
  misc_feature 1..1727: note Artificial____HsIgE(1-18)_Ec(J96)-FimH(22-300_N28S_N91S_N24 9Q)_Linker-PGDGN_Ec(J96)-FimG(24-37)_Linker-SGG_Ferritin(5- 167_N19Q) mRNA opt1
  source 1..1727: mol_type = other RNA
aggagagtcccgcagtcggcgtccagcggctctgcttgttcgtgtgtgtgtcgttgcaggccttattcaagcttaccatggactggacctggatcctgttcctcgtggccgccgcgacccgcgtccacagcttcgcctgcaagaccgccagcggcaccgcgatccccatcgggggcgggagcgccaacgtgtacgtcaacctggccccggtggtgaacgtcggccagaacctcgtggtggacctgtccacgcagatcttctgccacaacgactaccccgagaccatcaccgactacgtcaccctgcagcgcgggagcgcctacggcggcgtgctctccagcttcagcgggacggtgaagtactccggcagctcctaccccttccccaccaccagcgagaccccgcgggtcgtgtacaactcccgcacggacaagccctggcccgtggccctgtacctgacccccgtcagctccgccgggggcgtggcgatcaaggccgggagcctcatcgccgtgctgatcctgcggcagaccaacaactacaactccgacgacttccagttcgtctggaacatctacgcgaacaacgacgtggtggtcccgaccggcggctgcgacgtgagcgcccgcgacgtgacggtcaccctccccgactaccccgggtccgtgcccatcccgctgaccgtgtactgcgccaagagccagaacctgggctactacctctccgggaccacggccgacgccggcaacagcatcttcaccaacaccgcgtccttcagccccgcccagggcgtcggggtgcagctgacccggcagggcacgatcatccccgccaacaacaccgtcagcctgggggccgtgggcacctccgccgtgagcctcgggctgaccgcgaactacgcccgcacgggcggccaggtcaccgccgggaacgtgcagtccatcatcggcgtgaccttcgtctaccagcccggcgacgggaacgccgacgtgaccatcaccgtcaacggcaaggtggtggccaagagcggcggggacatcatcaagctcctgaacgagcaggtcaacaaggagatgcagtccagcaacctgtacatgtccatgagctcctggtgctacacccacagcctcgacggcgccgggctgttcctgttcgaccacgccgcggaggagtacgagcacgccaagaagctcatcatcttcctgaacgagaacaacgtgcccgtgcagctgacctccatcagcgccccggagcacaagttcgagggcctcacgcagatcttccagaaggcctacgagcacgagcagcacatctccgagagcatcaacaacatcgtggaccacgccatcaagtccaaggaccacgcgaccttcaacttcctgcagtggtacgtcgccgagcagcacgaggaggaggtgctgttcaaggacatcctcgacaagatcgagctgatcgggaacgagaaccacggcctgtacctcgccgaccagtacgtgaaggggatcgccaagagccgcaagtcctgatgatgaggactagtccctgttcccagagcccacttttttttctttttttgaaataaaatagcctgtctttcagatctcaaaggctcttttcagagccaccaaaaaaaaaaaaaaaaaaaaaaaaaaaaaaaaaaaaaaaaaaaaaaaaaaaaaaaaaaaaaaaaaaaaaaaaaaaaaaaaaaaaaaaaaaaaaaaaaaaaa

SEQ ID NO: 843 - RNA, 1727 nt, synthetic construct
  misc_feature 1..1727: note Artificial____HsIgE(1-18)_Ec(J96)-FimH(22-300_N28S_N91S_N24 9Q_N256D)_Linker-PGDGN_Ec(J96)-FimG(24-37)_Linker-SGG_Ferri tin(5-167_N19Q) mRNA opt1
  source 1..1727: mol_type = other RNA
aggagagtcccgcagtcggcgtccagcggctctgcttgttcgtgtgtgtgtcgttgcaggccttattcaagcttaccatggactggacctggatcctgttcctcgtggccgccgcgacccgcgtccacagcttcgcctgcaagaccgccagcggcaccgcgatccccatcgggggcgggagcgccaacgtgtacgtcaacctggccccggtggtgaacgtcggccagaacctcgtggtggacctgtccacgcagatcttctgccacaacgactaccccgagaccatcaccgactacgtcaccctgcagcgcgggagcgcctacggcggcgtgctctccagcttcagcgggacggtgaagtactccggcagctcctaccccttccccaccaccagcgagaccccgcgggtcgtgtacaactcccgcacggacaagccctggcccgtggccctgtacctgacccccgtcagctccgccgggggcgtggcgatcaaggccgggagcctcatcgccgtgctgatcctgcggcagaccaacaactacaactccgacgacttccagttcgtctggaacatctacgcgaacaacgacgtggtggtcccgaccggcggctgcgacgtgagcgcccgcgacgtgacggtcaccctccccgactaccccgggtccgtgcccatcccgctgaccgtgtactgcgccaagagccagaacctgggctactacctctccgggaccacggccgacgccggcaacagcatcttcaccaacaccgcgtccttcagccccgcccagggcgtcggggtgcagctgacccggcagggcacgatcatccccgccgacaacaccgtcagcctgggggccgtgggcacctccgccgtgagcctcgggctgaccgcgaactacgcccgcacgggcggccaggtcaccgccgggaacgtgcagtccatcatcggcgtgaccttcgtctaccagcccggcgacgggaacgccgacgtgaccatcaccgtcaacggcaaggtggtggccaagagcggcggggacatcatcaagctcctgaacgagcaggtcaacaaggagatgcagtccagcaacctgtacatgtccatgagctcctggtgctacacccacagcctcgacggcgccgggctgttcctgttcgaccacgccgcggaggagtacgagcacgccaagaagctcatcatcttcctgaacgagaacaacgtgcccgtgcagctgacctccatcagcgccccggagcacaagttcgagggcctcacgcagatcttccagaaggcctacgagcacgagcagcacatctccgagagcatcaacaacatcgtggaccacgccatcaagtccaaggaccacgcgaccttcaacttcctgcagtggtacgtcgccgagcagcacgaggaggaggtgctgttcaaggacatcctcgacaagatcgagctgatcgggaacgagaaccacggcctgtacctcgccgaccagtacgtgaaggggatcgccaagagccgcaagtcctgatgatgaggactagtccctgttcccagagcccacttttttttctttttttgaaataaaatagcctgtctttcagatctcaaaggctcttttcagagccaccaaaaaaaaaaaaaaaaaaaaaaaaaaaaaaaaaaaaaaaaaaaaaaaaaaaaaaaaaaaaaaaaaaaaaaaaaaaaaaaaaaaaaaaaaaaaaaaaaaaaa

SEQ ID NO: 844 - RNA, 1727 nt, synthetic construct
  misc_feature 1..1727: note Artificial____HsIgE(1-18)_Ec(J96)-FimH(22-300_N28S_V48C_L55 C_N91S_N249Q)_Linker-PGDGN_Ec(J96)-FimG(24-37)_Linker-SGG_F erritin(5-167_N19Q) mRNA opt1
  source 1..1727: mol_type = other RNA
aggagagtcccgcagtcggcgtccagcggctctgcttgttcgtgtgtgtgtcgttgcaggccttattcaagcttaccatggactggacctggatcctgttcctcgtggccgccgcgacccgcgtccacagcttcgcctgcaagaccgccagcggcaccgcgatccccatcgggggcgggagcgccaacgtgtacgtcaacctggccccgtgcgtgaacgtcggccagaactgcgtggtggacctgtccacgcagatcttctgccacaacgactaccccgagaccatcaccgactacgtcaccctgcagcgcgggagcgcctacggcggcgtgctctccagcttcagcgggacggtgaagtactccggcagctcctaccccttccccaccaccagcgagaccccgcgggtcgtgtacaactcccgcacggacaagccctggcccgtggccctgtacctgacccccgtcagctccgccgggggcgtggcgatcaaggccgggagcctcatcgccgtgctgatcctgcggcagaccaacaactacaactccgacgacttccagttcgtctggaacatctacgcgaacaacgacgtggtggtcccgaccggcggctgcgacgtgagcgcccgcgacgtgacggtcaccctccccgactaccccgggtccgtgcccatcccgctgaccgtgtactgcgccaagagccagaacctgggctactacctctccgggaccacggccgacgccggcaacagcatcttcaccaacaccgcgtccttcagccccgcccagggcgtcggggtgcagctgacccggcagggcacgatcatccccgccaacaacaccgtcagcctgggggccgtgggcacctccgccgtgagcctcgggctgaccgcgaactacgcccgcacgggcggccaggtcaccgccgggaacgtgcagtccatcatcggcgtgaccttcgtctaccagcccggcgacgggaacgccgacgtgaccatcaccgtcaacggcaaggtggtggccaagagcggcggggacatcatcaagctcctgaacgagcaggtcaacaaggagatgcagtccagcaacctgtacatgtccatgagctcctggtgctacacccacagcctcgacggcgccgggctgttcctgttcgaccacgccgcggaggagtacgagcacgccaagaagctcatcatcttcctgaacgagaacaacgtgcccgtgcagctgacctccatcagcgccccggagcacaagttcgagggcctcacgcagatcttccagaaggcctacgagcacgagcagcacatctccgagagcatcaacaacatcgtggaccacgccatcaagtccaaggaccacgcgaccttcaacttcctgcagtggtacgtcgccgagcagcacgaggaggaggtgctgttcaaggacatcctcgacaagatcgagctgatcgggaacgagaaccacggcctgtacctcgccgaccagtacgtgaaggggatcgccaagagccgcaagtcctgatgatgaggactagtccctgttcccagagcccacttttttttctttttttgaaataaaatagcctgtctttcagatctcaaaggctcttttcagagccaccaaaaaaaaaaaaaaaaaaaaaaaaaaaaaaaaaaaaaaaaaaaaaaaaaaaaaaaaaaaaaaaaaaaaaaaaaaaaaaaaaaaaaaaaaaaaaaaaaaaaa

SEQ ID NO: 845 - RNA, 1727 nt, synthetic construct
  misc_feature 1..1727: note Artificial____HsIgE(1-18)_Ec(J96)-FimH(22-300_F165V)_Linker -PGDGN_Ec(J96)-FimG(24-37)_Linker-SGG_Ferritin(5-167_N19Q) mRNA opt1
  source 1..1727: mol_type = other RNA
aggagagtcccgcagtcggcgtccagcggctctgcttgttcgtgtgtgtgtcgttgcaggccttattcaagcttaccatggactggacctggatcctgttcctcgtggccgccgcgacccgcgtccacagcttcgcctgcaagaccgccaacggcaccgcgatccccatcgggggcgggagcgccaacgtgtacgtcaacctggccccggtggtgaacgtcggccagaacctcgtggtggacctgtccacgcagatcttctgccacaacgactaccccgagaccatcaccgactacgtcaccctgcagcgcgggagcgcctacggcggcgtgctctccaacttcagcgggacggtgaagtactccggcagctcctaccccttccccaccaccagcgagaccccgcgggtcgtgtacaactcccgcacggacaagccctggcccgtggccctgtacctgacccccgtcagctccgccgggggcgtggcgatcaaggccgggagcctcatcgccgtgctgatcctgcggcagaccaacaactacaactccgacgacttccaggtggtctggaacatctacgcgaacaacgacgtggtggtcccgaccggcggctgcgacgtgagcgcccgcgacgtgacggtcaccctccccgactaccccgggtccgtgcccatcccgctgaccgtgtactgcgccaagagccagaacctgggctactacctctccgggaccacggccgacgccggcaacagcatcttcaccaacaccgcgtccttcagccccgcccagggcgtcggggtgcagctgacccggaacggcacgatcatccccgccaacaacaccgtcagcctgggggccgtgggcacctccgccgtgagcctcgggctgaccgcgaactacgcccgcacgggcggccaggtcaccgccgggaacgtgcagtccatcatcggcgtgaccttcgtctaccagcccggcgacgggaacgccgacgtgaccatcaccgtcaacggcaaggtggtggccaagagcggcggggacatcatcaagctcctgaacgagcaggtcaacaaggagatgcagtccagcaacctgtacatgtccatgagctcctggtgctacacccacagcctcgacggcgccgggctgttcctgttcgaccacgccgcggaggagtacgagcacgccaagaagctcatcatcttcctgaacgagaacaacgtgcccgtgcagctgacctccatcagcgccccggagcacaagttcgagggcctcacgcagatcttccagaaggcctacgagcacgagcagcacatctccgagagcatcaacaacatcgtggaccacgccatcaagtccaaggaccacgcgaccttcaacttcctgcagtggtacgtcgccgagcagcacgaggaggaggtgctgttcaaggacatcctcgacaagatcgagctgatcgggaacgagaaccacggcctgtacctcgccgaccagtacgtgaaggggatcgccaagagccgcaagtcctgatgatgaggactagtccctgttcccagagcccacttttttttctttttttgaaataaaatagcctgtctttcagatctcaaaggctcttttcagagccaccaaaaaaaaaaaaaaaaaaaaaaaaaaaaaaaaaaaaaaaaaaaaaaaaaaaaaaaaaaaaaaaaaaaaaaaaaaaaaaaaaaaaaaaaaaaaaaaaaaaaa

SEQ ID NO: 846 - RNA, 1004 nt, synthetic construct
  misc_feature 1..1004: note Artificial____Ec(J96)-FimC(1-36)_Ec(J96)-FimC(37-241) mRNA opt1
  source 1..1004: mol_type = other RNA
aggagagtcccgcagtcggcgtccagcggctctgcttgttcgtgtgtgtgtcgttgcaggccttattcaagcttaccatgagcaacaagaacgtgaacgtccgcaagtcccaggagatcaccttctgcctgctcgccggcatcctgatgttcatggccatgatggtggcggggcgggccgaggccggcgtggccctgggggccacccgcgtcatctaccccgcgggccagaagcaggtccagctcgccgtgacgaacaacgacgagaacagcacctacctgatccagtcctgggtggagaacgccgacggggtgaaggacggccggttcatcgtgaccccgcccctgttcgccatgaagggcaagaaggagaacaccctccgcatcctggacgcgacgaacaaccagctgccccaggaccgggagagcctcttctggatgaacgtcaaggccatcccctccatggacaagagcaagctgaccgagaacaccctgcagctcgccatcatctcccgcatcaagctgtactaccggccggccaagctggccctcccgcccgaccaggcggccgagaagctgcgcttccggcgcagcgccaactccctgaccctcatcaaccccacgccctactacctgaccgtgaccgagctgaacgccgggacccgggtgctcgagaacgccctggtcccgcccatgggcgagagcacggtgaagctgccctccgacgcggggagcaacatcacctaccgcaccatcaacgactacggcgccctcacccccaagatgacgggggtgatggagtgatgatgaggactagtccctgttcccagagcccacttttttttctttttttgaaataaaatagcctgtctttcagatctcaaaggctcttttcagagccaccaaaaaaaaaaaaaaaaaaaaaaaaaaaaaaaaaaaaaaaaaaaaaaaaaaaaaaaaaaaaaaaaaaaaaaaaaaaaaaaaaaaaaaaaaaaaaaaaaaaaa

SEQ ID NO: 847 - RNA, 950 nt, synthetic construct
  misc_feature 1..950: note = Artificial____HsIgE(1-18)_Ec(J96)-FimC(37-241) mRNA opt1
  source 1..950: mol_type = other RNA
aggagagtcccgcagtcggcgtccagcggctctgcttgttcgtgtgtgtgtcgttgcaggccttattcaagcttaccatggactggacctggatcctgttcctcgtggccgccgcgacccgcgtccacagcggcgtggccctgggggccacgcgggtgatctaccccgccggccagaagcaggtccagctggccgtgaccaacaacgacgagaactccacctacctcatccagagctgggtggagaacgcggacggggtcaaggacggccgcttcatcgtgaccccgcccctgttcgccatgaaggggaagaaggagaacacgctgcggatcctcgacgccaccaacaaccagctgccccaggaccgcgagtccctgttctggatgaacgtgaaggccatccccagcatggacaagtccaagctcaccgagaacaccctgcagctggcgatcatcagccggatcaagctctactaccgcccggccaagctggccctgccgcccgaccaggccgccgagaagctccggttccgccggtccgcgaacagcctgacgctgatcaaccccaccccctactacctcaccgtcaccgagctgaacgccggcacgcgcgtgctggagaacgccctcgtgccgcccatgggcgagtccaccgtcaagctgcccagcgacgccgggtccaacatcacctaccggaccatcaacgactacggcgccctgacgcccaagatgaccggggtgatggagtgatgatgaggactagtccctgttcccagagcccacttttttttctttttttgaaataaaatagcctgtctttcagatctcaaaggctcttttcagagccaccaaaaaaaaaaaaaaaaaaaaaaaaaaaaaaaaaaaaaaaaaaaaaaaaaaaaaaaaaaaaaaaaaaaaaaaaaaaaaaaaaaaaaaaaaaaaaaaaaaaaa

SEQ ID NO: 848 - RNA, 1181 nt, synthetic construct
  misc_feature 1..1181: note Artificial____Ec(J96)-FimH(1-21)_Ec(J96)-FimH(22-300) mRNA opt1
  source 1..1181: mol_type = other RNA
aggagagtcccgcagtcggcgtccagcggctctgcttgttcgtgtgtgtgtcgttgcaggccttattcaagcttaccatgaagcgcgtgatcaccctgttcgccgtcctcctgatgggctggagcgtgaacgcctggtccttcgcgtgcaagaccgccaacgggacggccatccccatcggcgggggcagcgccaacgtgtacgtcaacctggccccggtggtgaacgtcgggcagaacctcgtggtggacctgtccacccagatcttctgccacaacgactaccccgagaccatcaccgactacgtcacgctgcagcggggcagcgcgtacggcggggtgctctccaacttcagcggcaccgtgaagtactccgggagctcctaccccttccccaccaccagcgagacgccgcgcgtcgtgtacaactcccggaccgacaagccctggcccgtggccctgtacctgacccccgtcagctccgccggcggggtggccatcaaggcgggcagcctcatcgccgtgctgatcctgcgccagaccaacaactacaactccgacgacttccagttcgtctggaacatctacgccaacaacgacgtggtggtcccgacgggcgggtgcgacgtgagcgcccgggacgtgaccgtcaccctccccgactaccccggctccgtgcccatcccgctgaccgtctactgcgccaagagccagaacctggggtactacctctccggcacgaccgcggacgccggcaacagcatcttcaccaacaccgccagcttctcccccgcccagggggtgggcgtgcagctgacgcgcaacgggaccatcatccccgccaacaacaccgtcagcctgggcgcggtggggacctccgccgtgagcctcggcctgacggccaactacgcccggaccggcgggcaggtcaccgccggcaacgtgcagtccatcatcggggtgaccttcgtctaccagtgatgatgaggactagtccctgttcccagagcccacttttttttctttttttgaaataaaatagcctgtctttcagatctcaaaggctcttttcagagccaccaaaaaaaaaaaaaaaaaaaaaaaaaaaaaaaaaaaaaaaaaaaaaaaaaaaaaaaaaaaaaaaaaaaaaaaaaaaaaaaaaaaaaaaaaaaaaaaaaaaaa

SEQ ID NO: 849 - RNA, 1172 nt, synthetic construct
  misc_feature 1..1172: note = Artificial____HsIgE(1-18)_Ec(J96)-FimH(22-300) mRNA opt1
  source 1..1172: mol_type = other RNA
aggagagtcccgcagtcggcgtccagcggctctgcttgttcgtgtgtgtgtcgttgcaggccttattcaagcttaccatggactggacctggatcctgttcctcgtggccgccgcgacccgcgtccacagcttcgcctgcaagacggccaacggcaccgccatccccatcgggggcgggtccgccaacgtgtacgtgaacctggcgccggtcgtgaacgtgggccagaacctggtcgtggacctcagcacccagatcttctgccacaacgactaccccgagaccatcacggactacgtgaccctgcagcgggggtccgcctacggcggcgtcctgagcaacttctccgggaccgtgaagtacagcggctccagctaccccttccccaccacgtccgagaccccgcgcgtggtctacaacagccggaccgacaagccctggcccgtggccctctacctgacccccgtgtccagcgccgggggcgtcgcgatcaaggccgggtccctgatcgccgtgctcatcctgcgccagacgaacaactacaacagcgacgacttccagttcgtgtggaacatctacgccaacaacgacgtcgtggtgccgaccggcggctgcgacgtctccgcccgggacgtgaccgtgaccctgcccgactaccccgggagcgtccccatcccgctcacggtgtactgcgcgaagtcccagaacctgggctactacctgagcgggaccaccgccgacgccggcaactccatcttcaccaacacggccagcttcagccccgcccagggcgtcggggtgcagctcacccgcaacggcaccatcatccccgcgaacaacaccgtgtccctgggggccgtcggcacgagcgccgtgtccctggggctcaccgccaactacgcccggaccggcggccaggtgaccgcggggaacgtccagagcatcatcggcgtgacgttcgtgtaccagtgatgatgaggactagtccctgttcccagagcccacttttttttctttttttgaaataaaatagcctgtctttcagatctcaaaggctcttttcagagccaccaaaaaaaaaaaaaaaaaaaaaaaaaaaaaaaaaaaaaaaaaaaaaaaaaaaaaaaaaaaaaaaaaaaaaaaaaaaaaaaaaaaaaaaaaaaaaaaaaaaaa

SEQ ID NO: 850 - RNA, 1178 nt, synthetic construct
  misc_feature 1..1178: note = Artificial____MmIgK(1-20)_Ec(J96)-FimH(22-300) mRNA opt1
  source 1..1178: mol_type = other RNA
aggagagtcccgcagtcggcgtccagcggctctgcttgttcgtgtgtgtgtcgttgcaggccttattcaagcttaccatggagaccgacaccctgctcctgtgggtgctgctcctgtgggtccccggcagcacggggttcgcctgcaagaccgccaacggcaccgcgatcccgatcgggggcgggtccgccaacgtgtacgtgaacctggcccccgtcgtgaacgtgggccagaacctcgtcgtggacctgagcacccagatcttctgccacaacgactaccccgagacgatcaccgactacgtgaccctgcagcgcggctccgcctacgggggcgtcctcagcaacttctccgggaccgtgaagtacagcggctccagctaccccttcccgacgacctccgagacgccccgggtggtctacaacagccgcaccgacaagccctggcccgtggccctgtacctgaccccggtgtccagcgccgggggcgtcgcgatcaaggccggctccctcatcgccgtgctgatcctgcggcagaccaacaactacaacagcgacgacttccagttcgtgtggaacatctacgcgaacaacgacgtcgtggtgcccaccgggggctgcgacgtctccgcccgcgacgtgaccgtgacgctccccgactaccccgggagcgtcccgatccccctgaccgtgtactgcgccaagtcccagaacctgggctactacctcagcggcaccaccgccgacgccgggaactccatcttcacgaacaccgcgagcttcagccccgcccagggcgtcggggtgcagctgacccggaacggcaccatcatccccgccaacaacacggtgtccctgggggccgtcggcaccagcgccgtgtccctcggcctgaccgcgaactacgcccgcaccgggggccaggtgacggccgggaacgtccagagcatcatcggcgtgaccttcgtgtaccagtgatgatgaggactagtccctgttcccagagcccacttttttttctttttttgaaataaaatagcctgtctttcagatctcaaaggctcttttcagagccaccaaaaaaaaaaaaaaaaaaaaaaaaaaaaaaaaaaaaaaaaaaaaaaaaaaaaaaaaaaaaaaaaaaaaaaaaaaaaaaaaaaaaaaaaaaaaaaaaaaaaa

SEQ ID NO: 851 - RNA, 1238 nt, synthetic construct
  misc_feature 1..1238: note Artificial____Ec(J96)-FimH(1-21)_Ec(J96)-FimH(22-300)_Linke r-PGDGN_Ec(J96)-FimG(24-37) mRNA opt1
  source 1..1238: mol_type = other RNA
aggagagtcccgcagtcggcgtccagcggctctgcttgttcgtgtgtgtgtcgttgcaggccttattcaagcttaccatgaagcgcgtgatcaccctgttcgccgtcctcctgatgggctggagcgtgaacgcctggtccttcgcgtgcaagaccgccaacgggacggccatccccatcggcgggggcagcgccaacgtgtacgtcaacctggccccggtggtgaacgtcgggcagaacctcgtggtggacctgtccacccagatcttctgccacaacgactaccccgagaccatcaccgactacgtcacgctgcagcggggcagcgcgtacggcggggtgctctccaacttcagcggcaccgtgaagtactccgggagctcctaccccttccccaccaccagcgagacgccgcgcgtcgtgtacaactcccggaccgacaagccctggcccgtggccctgtacctgacccccgtcagctccgccggcggggtggccatcaaggcgggcagcctcatcgccgtgctgatcctgcgccagaccaacaactacaactccgacgacttccagttcgtctggaacatctacgccaacaacgacgtggtggtcccgacgggcgggtgcgacgtgagcgcccgggacgtgaccgtcaccctccccgactaccccggctccgtgcccatcccgctgaccgtctactgcgccaagagccagaacctggggtactacctctccggcacgaccgcggacgccggcaacagcatcttcaccaacaccgccagcttctcccccgcccagggggtgggcgtgcagctgacgcgcaacgggaccatcatccccgccaacaacaccgtcagcctgggcgcggtggggacctccgccgtgagcctcggcctgacggccaactacgcccggaccggcgggcaggtcaccgccggcaacgtgcagtccatcatcggggtgaccttcgtctaccagcccggcgacgggaacgcggacgtgacgatcaccgtgaacggcaaggtcgtggccaagtgatgatgaggactagtccctgttcccagagcccacttttttttctttttttgaaataaaatagcctgtctttcagatctcaaaggctcttttcagagccaccaaaaaaaaaaaaaaaaaaaaaaaaaaaaaaaaaaaaaaaaaaaaaaaaaaaaaaaaaaaaaaaaaaaaaaaaaaaaaaaaaaaaaaaaaaaaaaaaaaaaa

SEQ ID NO: 852 - RNA, 1229 nt, synthetic construct
  misc_feature 1..1229: note Artificial____HsIgE(1-18)_Ec(J96)-FimH(22-300)_Linker-PGDGN _Ec(J96)-FimG(24-37) mRNA opt1
  source 1..1229: mol_type = other RNA
aggagagtcccgcagtcggcgtccagcggctctgcttgttcgtgtgtgtgtcgttgcaggccttattcaagcttaccatggactggacctggatcctgttcctcgtggccgccgcgacccgcgtccacagcttcgcctgcaagacggccaacggcaccgccatccccatcgggggcgggtccgccaacgtgtacgtgaacctggcgccggtcgtgaacgtgggccagaacctggtcgtggacctcagcacccagatcttctgccacaacgactaccccgagaccatcacggactacgtgaccctgcagcgggggtccgcctacggcggcgtcctgagcaacttctccgggaccgtgaagtacagcggctccagctaccccttccccaccacgtccgagaccccgcgcgtggtctacaacagccggaccgacaagccctggcccgtggccctctacctgacccccgtgtccagcgccgggggcgtcgcgatcaaggccgggtccctgatcgccgtgctcatcctgcgccagacgaacaactacaacagcgacgacttccagttcgtgtggaacatctacgccaacaacgacgtcgtggtgccgaccggcggctgcgacgtctccgcccgggacgtgaccgtgaccctgcccgactaccccgggagcgtccccatcccgctcacggtgtactgcgcgaagtcccagaacctgggctactacctgagcgggaccaccgccgacgccggcaactccatcttcaccaacacggccagcttcagccccgcccagggcgtcggggtgcagctcacccgcaacggcaccatcatccccgcgaacaacaccgtgtccctgggggccgtcggcacgagcgccgtgtccctggggctcaccgccaactacgcccggaccggcggccaggtgaccgcggggaacgtccagagcatcatcggcgtgacgttcgtgtaccagcccggggacggcaacgccgacgtcaccatcaccgtgaacgggaaggtggtcgccaagtgatgatgaggactagtccctgttcccagagcccacttttttttctttttttgaaataaaatagcctgtctttcagatctcaaaggctcttttcagagccaccaaaaaaaaaaaaaaaaaaaaaaaaaaaaaaaaaaaaaaaaaaaaaaaaaaaaaaaaaaaaaaaaaaaaaaaaaaaaaaaaaaaaaaaaaaaaaaaaaaaaa

SEQ ID NO: 853 - RNA, 1235 nt, synthetic construct
  misc_feature 1..1235: note Artificial____HsIgE(1-18)_Ec(J96)-FimH(22-300)_Linker-G4SGG _Ec(J96)-FimG(24-37) mRNA opt1
  source 1..1235: mol_type = other RNA
aggagagtcccgcagtcggcgtccagcggctctgcttgttcgtgtgtgtgtcgttgcaggccttattcaagcttaccatggactggacctggatcctgttcctcgtggccgccgcgacccgcgtccacagcttcgcctgcaagacggccaacggcaccgccatccccatcgggggcgggtccgccaacgtgtacgtgaacctggcgccggtcgtgaacgtgggccagaacctggtcgtggacctcagcacccagatcttctgccacaacgactaccccgagaccatcacggactacgtgaccctgcagcgggggtccgcctacggcggcgtcctgagcaacttctccgggaccgtgaagtacagcggctccagctaccccttccccaccacgtccgagaccccgcgcgtggtctacaacagccggaccgacaagccctggcccgtggccctctacctgacccccgtgtccagcgccgggggcgtcgcgatcaaggccgggtccctgatcgccgtgctcatcctgcgccagacgaacaactacaacagcgacgacttccagttcgtgtggaacatctacgccaacaacgacgtcgtggtgccgaccggcggctgcgacgtctccgcccgggacgtgaccgtgaccctgcccgactaccccgggagcgtccccatcccgctcacggtgtactgcgcgaagtcccagaacctgggctactacctgagcgggaccaccgccgacgccggcaactccatcttcaccaacacggccagcttcagccccgcccagggcgtcggggtgcagctcacccgcaacggcaccatcatccccgcgaacaacaccgtgtccctgggggccgtcggcacgagcgccgtgtccctggggctcaccgccaactacgcccggaccggcggccaggtgaccgcggggaacgtccagagcatcatcggcgtgacgttcgtgtaccagggcgggggcgggtccggcggggccgacgtcaccatcaccgtgaacggcaaggtggtcgccaagtgatgatgaggactagtccctgttcccagagcccacttttttttctttttttgaaataaaatagcctgtctttcagatctcaaaggctcttttcagagccaccaaaaaaaaaaaaaaaaaaaaaaaaaaaaaaaaaaaaaaaaaaaaaaaaaaaaaaaaaaaaaaaaaaaaaaaaaaaaaaaaaaaaaaaaaaaaaaaaaaaaa

SEQ ID NO: 854 - RNA, 1235 nt, synthetic construct
  misc_feature 1..1235: note Artificial____MmIgK(1-20)_Ec(J96)-FimH(22-300)_Linker-PGDGN _Ec(J96)-FimG(24-37) mRNA opt1
  source 1..1235: mol_type = other RNA
aggagagtcccgcagtcggcgtccagcggctctgcttgttcgtgtgtgtgtcgttgcaggccttattcaagcttaccatggagaccgacaccctgctcctgtgggtgctgctcctgtgggtccccggcagcacggggttcgcctgcaagaccgccaacggcaccgcgatcccgatcgggggcgggtccgccaacgtgtacgtgaacctggcccccgtcgtgaacgtgggccagaacctcgtcgtggacctgagcacccagatcttctgccacaacgactaccccgagacgatcaccgactacgtgaccctgcagcgcggctccgcctacgggggcgtcctcagcaacttctccgggaccgtgaagtacagcggctccagctaccccttcccgacgacctccgagacgccccgggtggtctacaacagccgcaccgacaagccctggcccgtggccctgtacctgaccccggtgtccagcgccgggggcgtcgcgatcaaggccggctccctcatcgccgtgctgatcctgcggcagaccaacaactacaacagcgacgacttccagttcgtgtggaacatctacgcgaacaacgacgtcgtggtgcccaccgggggctgcgacgtctccgcccgcgacgtgaccgtgacgctccccgactaccccgggagcgtcccgatccccctgaccgtgtactgcgccaagtcccagaacctgggctactacctcagcggcaccaccgccgacgccgggaactccatcttcacgaacaccgcgagcttcagccccgcccagggcgtcggggtgcagctgacccggaacggcaccatcatccccgccaacaacacggtgtccctgggggccgtcggcaccagcgccgtgtccctcggcctgaccgcgaactacgcccgcaccgggggccaggtgacggccgggaacgtccagagcatcatcggcgtgaccttcgtgtaccagccgggggacggcaacgccgacgtcaccatcaccgtgaacggcaaggtggtcgccaagtgatgatgaggactagtccctgttcccagagcccacttttttttctttttttgaaataaaatagcctgtctttcagatctcaaaggctcttttcagagccaccaaaaaaaaaaaaaaaaaaaaaaaaaaaaaaaaaaaaaaaaaaaaaaaaaaaaaaaaaaaaaaaaaaaaaaaaaaaaaaaaaaaaaaaaaaaaaaaaaaaaa

SEQ ID NO: 855 - RNA, 1235 nt, synthetic construct
  misc_feature 1..1235: note Artificial____MmIgK(1-20)_Ec(536)-FimH(22-300)_Linker-PGDGN _Ec(J96)-FimG(24-37) mRNA opt1
  source 1..1235: mol_type = other RNA
aggagagtcccgcagtcggcgtccagcggctctgcttgttcgtgtgtgtgtcgttgcaggccttattcaagcttaccatggagaccgacaccctgctcctgtgggtgctgctcctgtgggtccccggcagcacggggttcgcctgcaagaccgccaacggcaccgcgatcccgatcgggggcgggtccgccaacgtgtacgtgaacctggcccccgccgtcaacgtgggccagaacctcgtggtcgacctgagcacccagatcttctgccacaacgactaccccgagacgatcaccgactacgtgaccctgcagcgcggctccgcctacgggggcgtgctcagctccttcagcgggaccgtcaagtacaacggctccagctaccccttcccgacgacctccgagacgccccgggtggtgtacaacagccgcaccgacaagccctggcccgtcgcgctgtacctgaccccggtgtccagcgccgggggcgtggccatcaaggccggctccctcatcgcggtcctgatcctgcggcagaccaacaactacaacagcgacgacttccagttcgtgtggaacatctacgccaacaacgacgtggtcgtgcccaccgggggctgcgacgtgtccgcccgcgacgtcaccgtgacgctccccgactaccccgggagcgtgccgatccccctgaccgtctactgcgccaagtcccagaacctgggctactacctcagcggcaccaccgccgacgcggggaactccatcttcacgaacaccgccagcttcagccccgcccagggcgtgggggtccagctgacccggaacggcaccatcatccccgccaacaacacggtgtccctgggggccgtgggcaccagcgcggtctccctcggcctgaccgccaactacgcccgcaccgggggccaggtgacggccgggaacgtgcagagcatcatcggcgtcaccttcgtgtaccagccgggggacggcaacgccgacgtgaccatcaccgtcaacggcaaggtggtggcgaagtgatgatgaggactagtccctgttcccagagcccacttttttttctttttttgaaataaaatagcctgtctttcagatctcaaaggctcttttcagagccaccaaaaaaaaaaaaaaaaaaaaaaaaaaaaaaaaaaaaaaaaaaaaaaaaaaaaaaaaaaaaaaaaaaaaaaaaaaaaaaaaaaaaaaaaaaaaaaaaaaaaa

SEQ ID NO: 856 - RNA, 1259 nt, synthetic construct
  misc_feature 1..1259: note Artificial____HsIgE(1-18)_Ec(J96)-FimH(22-300)_Linker-(G4S) 3_Ec(J96)-FimC(135-148) mRNA opt1
  source 1..1259: mol_type = other RNA
aggagagtcccgcagtcggcgtccagcggctctgcttgttcgtgtgtgtgtcgttgcaggccttattcaagcttaccatggactggacctggatcctgttcctcgtggccgccgcgacccgcgtccacagcttcgcctgcaagacggccaacggcaccgccatccccatcgggggcgggtccgccaacgtgtacgtgaacctggcgccggtcgtgaacgtgggccagaacctggtcgtggacctcagcacccagatcttctgccacaacgactaccccgagaccatcacggactacgtgaccctgcagcgggggtccgcctacggcggcgtcctgagcaacttctccgggaccgtgaagtacagcggctccagctaccccttccccaccacgtccgagaccccgcgcgtggtctacaacagccggaccgacaagccctggcccgtggccctctacctgacccccgtgtccagcgccgggggcgtcgcgatcaaggccgggtccctgatcgccgtgctcatcctgcgccagacgaacaactacaacagcgacgacttccagttcgtgtggaacatctacgccaacaacgacgtcgtggtgccgaccggcggctgcgacgtctccgcccgggacgtgaccgtgaccctgcccgactaccccgggagcgtccccatcccgctcacggtgtactgcgcgaagtcccagaacctgggctactacctgagcgggaccaccgccgacgccggcaactccatcttcaccaacacggccagcttcagccccgcccagggcgtcggggtgcagctcacccgcaacggcaccatcatccccgcgaacaacaccgtgtccctgggggccgtcggcacgagcgccgtgtccctggggctcaccgccaactacgcccggaccggcggccaggtgaccgcggggaacgtccagagcatcatcggcgtgacgttcgtgtaccagggcgggggcgggtccggcgggggcgggagcggcgggggcggctccaccgagaacaccctgcagctggccatcatcagccgcatcaagtgatgatgaggactagtccctgttcccagagcccacttttttttctttttttgaaataaaatagcctgtctttcagatctcaaaggctcttttcagagccaccaaaaaaaaaaaaaaaaaaaaaaaaaaaaaaaaaaaaaaaaaaaaaaaaaaaaaaaaaaaaaaaaaaaaaaaaaaaaaaaaaaaaaaaaaaaaaaaaaaaaa

SEQ ID NO: 857 - RNA, 1682 nt, synthetic construct
  misc_feature 1..1682: note Artificial____LumSynth(1-154_C37A_N102D)_Linker(GGS)4-GGG_E c(J96)-FimH(22-300)_Linker-PGDGN_Ec(J96)-FimG(24-37) mRNA opt1
  source 1..1682: mol_type = other RNA
aggagagtcccgcagtcggcgtccagcggctctgcttgttcgtgtgtgtgtcgttgcaggccttattcaagcttaccatgcagatctacgagggcaagctgaccgccgaggggctccgcttcggcatcgtggccagccggttcaaccacgcgctggtcgaccgcctggtggagggggccatcgacgccatcgtgcggcacggcgggcgcgaggaggacatcaccctcgtccgggtgcccggctcctgggagatcccggtggccgccggcgagctggcgcgcaaggaggacatcgacgccgtcatcgccatcggggtgctgatccggggcgccacgccccacttcgactacatcgcgagcgaggtgtccaaggggctcgccgacctgagcctggagctccgcaagcccatcaccttcggcgtcatcaccgccgacaccctggagcaggccatcgagcgggccgggacgaagcacggcaacaagggctgggaggcggccctgtccgccatcgagatggccaacctcttcaagagcctgcgcgggggctccgggggcagcggcgggtccggcgggagcggcgggggcttcgcctgcaagaccgcgaacggcaccgccatccccatcgggggcgggtccgccaacgtgtacgtgaacctggccccggtcgtgaacgtgggccagaacctcgtcgtggacctgagcacccagatcttctgccacaacgactaccccgagacgatcaccgactacgtgaccctgcagcgggggtccgcctacggcggcgtcctcagcaacttctccgggaccgtgaagtacagcggctccagctaccccttccccacgacctccgagaccccgcgcgtggtctacaacagccggaccgacaagccctggcccgtggcgctgtacctgacgcccgtgagctccgccgggggcgtcgccatcaaggccgggagcctcatcgccgtgctgatcctgcgccagaccaacaactacaactccgacgacttccagttcgtctggaacatctacgcgaacaacgacgtggtggtcccgaccggcggctgcgacgtgagcgcccgggacgtgaccgtcacgctccccgactaccccgggtccgtgcccatcccgctgaccgtgtactgcgccaagagccagaacctgggctactacctctccgggaccaccgccgacgcgggcaacagcatcttcacgaacaccgcctccttcagccccgcccagggcgtcggggtgcagctgacccgcaacggcaccatcatccccgccaacaacacggtgtccctgggggccgtcggcaccagcgcggtgtccctcgggctgaccgccaactacgcccggaccggcggccaggtgacggccgggaacgtccagagcatcatcggcgtgaccttcgtgtaccagcccggggacggcaacgccgacgtcaccatcaccgtgaacgggaaggtggtcgcgaagtgatgatgaggactagtccctgttcccagagcccacttttttttctttttttgaaataaaatagcctgtctttcagatctcaaaggctcttttcagagccaccaaaaaaaaaaaaaaaaaaaaaaaaaaaaaaaaaaaaaaaaaaaaaaaaaaaaaaaaaaaaaaaaaaaaaaaaaaaaaaaaaaaaaaaaaaaaaaaaaaaaa

SEQ ID NO: 858 - RNA, 1700 nt, synthetic construct
  misc_feature 1..1700: note Artificial____HsIgE(1-18)_Ec(J96)-FimH(22-300)_Linker-PGDGN _Ec(J96)-FimG(24-37)_Linker-SGG_LumSynth(1-154_C37A_N102D) mRNA opt1
  source 1..1700: mol_type = other RNA
aggagagtcccgcagtcggcgtccagcggctctgcttgttcgtgtgtgtgtcgttgcaggccttattcaagcttaccatggactggacctggatcctgttcctcgtggccgccgcgacccgcgtccacagcttcgcctgcaagacggccaacggcaccgccatccccatcgggggcgggtccgccaacgtgtacgtgaacctggcgccggtcgtgaacgtgggccagaacctggtcgtggacctcagcacccagatcttctgccacaacgactaccccgagaccatcacggactacgtgaccctgcagcgggggtccgcctacggcggcgtcctgagcaacttctccgggaccgtgaagtacagcggctccagctaccccttccccaccacgtccgagaccccgcgcgtggtctacaacagccggaccgacaagccctggcccgtggccctctacctgacccccgtgtccagcgccgggggcgtcgcgatcaaggccgggtccctgatcgccgtgctcatcctgcgccagacgaacaactacaacagcgacgacttccagttcgtgtggaacatctacgccaacaacgacgtcgtggtgccgaccggcggctgcgacgtctccgcccgggacgtgaccgtgaccctgcccgactaccccgggagcgtccccatcccgctcacggtgtactgcgcgaagtcccagaacctgggctactacctgagcgggaccaccgccgacgccggcaactccatcttcaccaacacggccagcttcagccccgcccagggcgtcggggtgcagctcacccgcaacggcaccatcatccccgcgaacaacaccgtgtccctgggggccgtcggcacgagcgccgtgtccctggggctcaccgccaactacgcccggaccggcggccaggtgaccgcggggaacgtccagagcatcatcggcgtgacgttcgtgtaccagcccggggacggcaacgccgacgtcaccatcaccgtgaacgggaaggtggtcgccaagtccggcggcatgcagatctacgaggggaagctgaccgccgagggcctgcgcttcgggatcgtggccagccggttcaaccacgcgctcgtggaccgcctggtcgagggcgccatcgacgccatcgtgcggcacgggggccgcgaggaggacatcacgctggtgcgggtcccgggctcctgggagatccccgtggccgcgggggagctcgcccgcaaggaggacatcgacgccgtgatcgccatcggcgtcctgatccgcggggccacgccccacttcgactacatcgcgagcgaggtgtccaagggcctggccgacctcagcctggagctgcggaagcccatcaccttcggcgtgatcaccgccgacaccctcgagcaggccatcgagcgggccgggaccaagcacggcaacaaggggtgggaggcggccctgtccgccatcgagatggccaacctgttcaagagcctccgctgatgatgaggactagtccctgttcccagagcccacttttttttctttttttgaaataaaatagcctgtctttcagatctcaaaggctcttttcagagccaccaaaaaaaaaaaaaaaaaaaaaaaaaaaaaaaaaaaaaaaaaaaaaaaaaaaaaaaaaaaaaaaaaaaaaaaaaaaaaaaaaaaaaaaaaaaaaaaaaaaaa

SEQ ID NO: 859 - RNA, 1727 nt, synthetic construct
  misc_feature 1..1727: note Artificial____HsIgE(1-18)_Ec(J96)-FimH(22-300)_Linker-PGDGN _Ec(J96)-FimG(24-37)_Linker-SGG_Ferritin(5-167_N19Q) mRNA opt1
  source 1..1727: mol_type = other RNA
aggagagtcccgcagtcggcgtccagcggctctgcttgttcgtgtgtgtgtcgttgcaggccttattcaagcttaccatggactggacctggatcctgttcctcgtggccgccgcgacccgcgtccacagcttcgcctgcaagacggccaacggcaccgccatccccatcgggggcgggtccgccaacgtgtacgtgaacctggcgccggtcgtgaacgtgggccagaacctggtcgtggacctcagcacccagatcttctgccacaacgactaccccgagaccatcacggactacgtgaccctgcagcgggggtccgcctacggcggcgtcctgagcaacttctccgggaccgtgaagtacagcggctccagctaccccttccccaccacgtccgagaccccgcgcgtggtctacaacagccggaccgacaagccctggcccgtggccctctacctgacccccgtgtccagcgccgggggcgtcgcgatcaaggccgggtccctgatcgccgtgctcatcctgcgccagacgaacaactacaacagcgacgacttccagttcgtgtggaacatctacgccaacaacgacgtcgtggtgccgaccggcggctgcgacgtctccgcccgggacgtgaccgtgaccctgcccgactaccccgggagcgtccccatcccgctcacggtgtactgcgcgaagtcccagaacctgggctactacctgagcgggaccaccgccgacgccggcaactccatcttcaccaacacggccagcttcagccccgcccagggcgtcggggtgcagctcacccgcaacggcaccatcatccccgcgaacaacaccgtgtccctgggggccgtcggcacgagcgccgtgtccctggggctcaccgccaactacgcccggaccggcggccaggtgaccgcggggaacgtccagagcatcatcggcgtgacgttcgtgtaccagcccggggacggcaacgccgacgtcaccatcaccgtgaacgggaaggtggtcgccaagtccggcggcgacatcatcaagctgctgaacgagcaggtcaacaaggagatgcagagctccaacctctacatgagcatgtccagctggtgctacacccactccctggacggggccggcctgttcctcttcgaccacgccgcggaggagtacgagcacgccaagaagctgatcatcttcctgaacgagaacaacgtgccggtgcagctcacgagcatctccgcccccgagcacaagttcgaggggctgacccagatcttccagaaggcctacgagcacgagcagcacatcagcgagtccatcaacaacatcgtggaccacgcgatcaagagcaaggaccacgccaccttcaacttcctgcagtggtacgtggccgagcagcacgaggaggaggtcctcttcaaggacatcctggacaagatcgagctgatcggcaacgagaaccacgggctctacctggccgaccagtacgtgaagggcatcgccaagtcccgcaagagctgatgatgaggactagtccctgttcccagagcccacttttttttctttttttgaaataaaatagcctgtctttcagatctcaaaggctcttttcagagccaccaaaaaaaaaaaaaaaaaaaaaaaaaaaaaaaaaaaaaaaaaaaaaaaaaaaaaaaaaaaaaaaaaaaaaaaaaaaaaaaaaaaaaaaaaaaaaaaaaaaaa

SEQ ID NO: 860 - RNA, 1757 nt, synthetic construct
  misc_feature 1..1757: note Artificial____MmIgK(1-20)_Ec(J96)-FimH(22-300)_Linker-PGDGN _Ec(J96)-FimG(24-37)_Linker-(GGS)4_Ferritin(5-166) mRNA opt1
  source 1..1757: mol_type = other RNA
aggagagtcccgcagtcggcgtccagcggctctgcttgttcgtgtgtgtgtcgttgcaggccttattcaagcttaccatggagaccgacaccctgctcctgtgggtgctgctcctgtgggtccccggcagcacggggttcgcctgcaagaccgccaacggcaccgcgatcccgatcgggggcgggtccgccaacgtgtacgtgaacctggcccccgtcgtgaacgtgggccagaacctcgtcgtggacctgagcacccagatcttctgccacaacgactaccccgagacgatcaccgactacgtgaccctgcagcgcggctccgcctacgggggcgtcctcagcaacttctccgggaccgtgaagtacagcggctccagctaccccttcccgacgacctccgagacgccccgggtggtctacaacagccgcaccgacaagccctggcccgtggccctgtacctgaccccggtgtccagcgccgggggcgtcgcgatcaaggccggctccctcatcgccgtgctgatcctgcggcagaccaacaactacaacagcgacgacttccagttcgtgtggaacatctacgcgaacaacgacgtcgtggtgcccaccgggggctgcgacgtctccgcccgcgacgtgaccgtgacgctccccgactaccccgggagcgtcccgatccccctgaccgtgtactgcgccaagtcccagaacctgggctactacctcagcggcaccaccgccgacgccgggaactccatcttcacgaacaccgcgagcttcagccccgcccagggcgtcggggtgcagctgacccggaacggcaccatcatccccgccaacaacacggtgtccctgggggccgtcggcaccagcgccgtgtccctcggcctgaccgcgaactacgcccgcaccgggggccaggtgacggccgggaacgtccagagcatcatcggcgtgaccttcgtgtaccagccgggggacggcaacgccgacgtcaccatcaccgtgaacggcaaggtggtcgccaagggcgggtccgggggcagcgggggctccggcgggagcgacatcatcaagctgctcaacgagcaggtcaacaaggagatgaactccagcaacctgtacatgtccatgagctcctggtgctacacgcacagcctggacggcgcgggcctcttcctgttcgaccacgccgccgaggagtacgagcacgccaagaagctgatcatcttcctcaacgagaacaacgtgcccgtgcagctgacctccatcagcgcccccgagcacaagttcgaggggctgacccagatcttccagaaggcgtacgagcacgagcagcacatctccgagagcatcaacaacatcgtggaccacgccatcaagtccaaggaccacgccaccttcaacttcctccagtggtacgtggccgagcagcacgaggaggaggtcctgttcaaggacatcctggacaagatcgagctcatcggcaacgagaaccacgggctgtacctggcggaccagtacgtgaagggcatcgccaagagccggaagtgatgatgaggactagtccctgttcccagagcccacttttttttctttttttgaaataaaatagcctgtctttcagatctcaaaggctcttttcagagccaccaaaaaaaaaaaaaaaaaaaaaaaaaaaaaaaaaaaaaaaaaaaaaaaaaaaaaaaaaaaaaaaaaaaaaaaaaaaaaaaaaaaaaaaaaaaaaaaaaaaaa

SEQ ID NO: 861 - RNA, 1400 nt, synthetic construct
  misc_feature 1..1400: note Artificial____HsIgE(1-18)_Ec(J96)-FimH(22-300)_Linker-PGDGN _Ec(J96)-FimG(24-37)_TMdomain-HA(510-566) mRNA opt1
  source 1..1400: mol_type = other RNA
aggagagtcccgcagtcggcgtccagcggctctgcttgttcgtgtgtgtgtcgttgcaggccttattcaagcttaccatggactggacctggatcctgttcctcgtggccgccgcgacccgcgtccacagcttcgcctgcaagacggccaacggcaccgccatccccatcgggggcgggtccgccaacgtgtacgtgaacctggcgccggtcgtgaacgtgggccagaacctggtcgtggacctcagcacccagatcttctgccacaacgactaccccgagaccatcacggactacgtgaccctgcagcgggggtccgcctacggcggcgtcctgagcaacttctccgggaccgtgaagtacagcggctccagctaccccttccccaccacgtccgagaccccgcgcgtggtctacaacagccggaccgacaagccctggcccgtggccctctacctgacccccgtgtccagcgccgggggcgtcgcgatcaaggccgggtccctgatcgccgtgctcatcctgcgccagacgaacaactacaacagcgacgacttccagttcgtgtggaacatctacgccaacaacgacgtcgtggtgccgaccggcggctgcgacgtctccgcccgggacgtgaccgtgaccctgcccgactaccccgggagcgtccccatcccgctcacggtgtactgcgcgaagtcccagaacctgggctactacctgagcgggaccaccgccgacgccggcaactccatcttcaccaacacggccagcttcagccccgcccagggcgtcggggtgcagctcacccgcaacggcaccatcatccccgcgaacaacaccgtgtccctgggggccgtcggcacgagcgccgtgtccctggggctcaccgccaactacgcccggaccggcggccaggtgaccgcggggaacgtccagagcatcatcggcgtgacgttcgtgtaccagcccggggacggcaacgccgacgtcaccatcaccgtgaacgggaaggtggtcgccaaggccaagctgaaccgcgaggagatcgacggcgtgaagctggagtccacccggatctaccagatcctcgccatctacagcacggtggcgtccagcctggtcctggtggtgtccctcggcgccatcagcttctggatgtgctccaacgggagcctgcagtgccgcatctgcatctgatgatgaggactagtccctgttcccagagcccacttttttttctttttttgaaataaaatagcctgtctttcagatctcaaaggctcttttcagagccaccaaaaaaaaaaaaaaaaaaaaaaaaaaaaaaaaaaaaaaaaaaaaaaaaaaaaaaaaaaaaaaaaaaaaaaaaaaaaaaaaaaaaaaaaaaaaaaaaaaaaa

SEQ ID NO: 862 - RNA, 1733 nt, synthetic construct
  misc_feature 1..1733: note Artificial____HsIgE(1-18)_LumSynth(1-154_C37A_N102D)_Linker (GGS)4-GGG_Ec(J96)-FimH(22-300)_Linker-PGDGN_Ec(J96)-FimG(2 4-37) mRNA opt1
  source 1..1733: mol_type = other RNA
aggagagtcccgcagtcggcgtccagcggctctgcttgttcgtgtgtgtgtcgttgcaggccttattcaagcttaccatggactggacctggatcctgttcctcgtggccgccgcgacccgcgtccacagccagatctacgagggcaagctgacggccgaggggctgcggttcggcatcgtggcctcccgcttcaaccacgccctcgtggaccggctggtcgagggggccatcgacgcgatcgtgcgccacggcgggcgggaggaggacatcaccctggtgcgcgtccccggcagctgggagatcccggtggccgccggcgagctcgcccggaaggaggacatcgacgcggtgatcgccatcggggtcctgatccgcggcgccacgccccacttcgactacatcgcctccgaggtgagcaaggggctggccgacctctccctggagctgcggaagcccatcaccttcggcgtgatcaccgcggacaccctcgagcaggccatcgagcgcgccgggaccaagcacggcaacaagggctgggaggccgccctgagcgcgatcgagatggccaacctgttcaagtccctccgcgggggcagcgggggctccggcgggagcggcgggtccggcgggggcttcgcctgcaagaccgccaacggcacggccatccccatcgggggcgggagcgcgaacgtctacgtgaacctggccccggtggtcaacgtgggccagaacctggtggtcgacctctccacccagatcttctgccacaacgactaccccgagaccatcaccgactacgtgacgctgcagcgggggagcgcctacggcggcgtgctgtccaacttcagcgggaccgtcaagtactccggcagctcctaccccttccccaccaccagcgagacgccgcgggtggtgtacaacagccgcaccgacaagccctggcccgtcgccctctacctgacccccgtgtccagcgccgggggcgtcgcgatcaaggccgggtccctgatcgccgtgctcatcctgcggcagaccaacaactacaacagcgacgacttccagttcgtgtggaacatctacgccaacaacgacgtcgtggtgccgacgggcggctgcgacgtctccgcgcgcgacgtgaccgtgaccctgcccgactaccccgggagcgtccccatcccgctcaccgtgtactgcgccaagtcccagaacctgggctactacctgagcgggacgaccgccgacgccggcaactccatcttcaccaacaccgccagcttctcccccgcgcagggcgtgggggtccagctcacgcggaacggcaccatcatccccgccaacaacaccgtgagcctgggggccgtgggcacctccgccgtcagcctggggctcacggccaactacgcgcgcaccggcggccaggtgaccgccgggaacgtgcagtccatcatcggcgtcaccttcgtgtaccagcccggggacggcaacgccgacgtgacgatcaccgtcaacgggaaggtggtggccaagtgatgatgaggactagtccctgttcccagagcccacttttttttctttttttgaaataaaatagcctgtctttcagatctcaaaggctcttttcagagccaccaaaaaaaaaaaaaaaaaaaaaaaaaaaaaaaaaaaaaaaaaaaaaaaaaaaaaaaaaaaaaaaaaaaaaaaaaaaaaaaaaaaaaaaaaaaaaaaaaaaaa

SEQ ID NO: 863 - RNA, 1700 nt, synthetic construct
  misc_feature 1..1700: note Artificial____HsIgE(1-18)_Ec(J96)-FimH(22-300_N28S_N91S_N24 9Q)_Linker-PGDGN_Ec(J96)-FimG(24-37)_Linker-SGG_LumSynth(1- 154_C37A_N102D) mRNA opt1
  source 1..1700: mol_type = other RNA
aggagagtcccgcagtcggcgtccagcggctctgcttgttcgtgtgtgtgtcgttgcaggccttattcaagcttaccatggactggacctggatcctgttcctcgtggccgccgcgacccgcgtccacagcttcgcctgcaagacggcctccggcaccgccatccccatcgggggcgggagcgccaacgtgtacgtgaacctggcgccggtcgtgaacgtgggccagaacctggtcgtggacctctccacccagatcttctgccacaacgactaccccgagaccatcacggactacgtgaccctgcagcgggggagcgcctacggcggcgtcctgtccagcttctccgggaccgtgaagtacagcggctccagctaccccttccccaccacgtccgagaccccgcgcgtggtctacaacagccggaccgacaagccctggcccgtggccctctacctgacccccgtgtccagcgccgggggcgtcgcgatcaaggccgggtccctgatcgccgtgctcatcctgcgccagacgaacaactacaacagcgacgacttccagttcgtgtggaacatctacgccaacaacgacgtcgtggtgccgaccggcggctgcgacgtctccgcccgggacgtgaccgtgaccctgcccgactaccccgggagcgtccccatcccgctcacggtgtactgcgcgaagtcccagaacctgggctactacctgagcgggaccaccgccgacgccggcaacagcatcttcaccaacacggcctccttcagccccgcccagggcgtcggggtgcagctcacccgccagggcaccatcatccccgcgaacaacaccgtgtccctgggggccgtcggcacgagcgccgtgtccctggggctcaccgccaactacgcccggaccggcggccaggtgaccgcggggaacgtccagagcatcatcggcgtgacgttcgtgtaccagcccggggacggcaacgccgacgtcaccatcaccgtgaacgggaaggtggtcgccaagtccggcggcatgcagatctacgaggggaagctgaccgccgagggcctgcgcttcgggatcgtggccagccggttcaaccacgcgctcgtggaccgcctggtcgagggcgccatcgacgccatcgtgcggcacgggggccgcgaggaggacatcacgctggtgcgggtcccgggctcctgggagatccccgtggccgcgggggagctcgcccgcaaggaggacatcgacgccgtgatcgccatcggcgtcctgatccgcggggccacgccccacttcgactacatcgcgagcgaggtgtccaagggcctggccgacctcagcctggagctgcggaagcccatcaccttcggcgtgatcaccgccgacaccctcgagcaggccatcgagcgggccgggaccaagcacggcaacaaggggtgggaggcggccctgtccgccatcgagatggccaacctgttcaagagcctccgctgatgatgaggactagtccctgttcccagagcccacttttttttctttttttgaaataaaatagcctgtctttcagatctcaaaggctcttttcagagccaccaaaaaaaaaaaaaaaaaaaaaaaaaaaaaaaaaaaaaaaaaaaaaaaaaaaaaaaaaaaaaaaaaaaaaaaaaaaaaaaaaaaaaaaaaaaaaaaaaaaaa

SEQ ID NO: 864 - RNA, 1700 nt, synthetic construct
  misc_feature 1..1700: note Artificial____HsIgE(1-18)_Ec(J96)-FimH(22-300_N28S_N91S_N24 9Q_N256D)_Linker-PGDGN_Ec(J96)-FimG(24-37)_Linker-SGG_LumSy nth(1-154_C37A_N102D) mRNA opt1
  source 1..1700: mol_type = other RNA
aggagagtcccgcagtcggcgtccagcggctctgcttgttcgtgtgtgtgtcgttgcaggccttattcaagcttaccatggactggacctggatcctgttcctcgtggccgccgcgacccgcgtccacagcttcgcctgcaagacggcctccggcaccgccatccccatcgggggcgggagcgccaacgtgtacgtgaacctggcgccggtcgtgaacgtgggccagaacctggtcgtggacctctccacccagatcttctgccacaacgactaccccgagaccatcacggactacgtgaccctgcagcgggggagcgcctacggcggcgtcctgtccagcttctccgggaccgtgaagtacagcggctccagctaccccttccccaccacgtccgagaccccgcgcgtggtctacaacagccggaccgacaagccctggcccgtggccctctacctgacccccgtgtccagcgccgggggcgtcgcgatcaaggccgggtccctgatcgccgtgctcatcctgcgccagacgaacaactacaacagcgacgacttccagttcgtgtggaacatctacgccaacaacgacgtcgtggtgccgaccggcggctgcgacgtctccgcccgggacgtgaccgtgaccctgcccgactaccccgggagcgtccccatcccgctcacggtgtactgcgcgaagtcccagaacctgggctactacctgagcgggaccaccgccgacgccggcaacagcatcttcaccaacacggcctccttcagccccgcccagggcgtcggggtgcagctcacccgccagggcaccatcatccccgcggacaacaccgtgtccctgggggccgtcggcacgagcgccgtgtccctggggctcaccgccaactacgcccggaccggcggccaggtgaccgcggggaacgtccagagcatcatcggcgtgacgttcgtgtaccagcccggggacggcaacgccgacgtcaccatcaccgtgaacgggaaggtggtcgccaagtccggcggcatgcagatctacgaggggaagctgaccgccgagggcctgcgcttcgggatcgtggccagccggttcaaccacgcgctcgtggaccgcctggtcgagggcgccatcgacgccatcgtgcggcacgggggccgcgaggaggacatcacgctggtgcgggtcccgggctcctgggagatccccgtggccgcgggggagctcgcccgcaaggaggacatcgacgccgtgatcgccatcggcgtcctgatccgcggggccacgccccacttcgactacatcgcgagcgaggtgtccaagggcctggccgacctcagcctggagctgcggaagcccatcaccttcggcgtgatcaccgccgacaccctcgagcaggccatcgagcgggccgggaccaagcacggcaacaaggggtgggaggcggccctgtccgccatcgagatggccaacctgttcaagagcctccgctgatgatgaggactagtccctgttcccagagcccacttttttttctttttttgaaataaaatagcctgtctttcagatctcaaaggctcttttcagagccaccaaaaaaaaaaaaaaaaaaaaaaaaaaaaaaaaaaaaaaaaaaaaaaaaaaaaaaaaaaaaaaaaaaaaaaaaaaaaaaaaaaaaaaaaaaaaaaaaaaaaa

SEQ ID NO: 865 - RNA, 1700 nt, synthetic construct
  misc_feature 1..1700: note Artificial____HsIgE(1-18)_Ec(J96)-FimH(22-300_N28S_V48C_L55 C_N91S_N249Q)_Linker-PGDGN_Ec(J96)-FimG(24-37)_Linker-SGG_L umSynth(1-154_C37A_N102D) mRNA opt1
  source 1..1700: mol_type = other RNA
aggagagtcccgcagtcggcgtccagcggctctgcttgttcgtgtgtgtgtcgttgcaggccttattcaagcttaccatggactggacctggatcctgttcctcgtggccgccgcgacccgcgtccacagcttcgcctgcaagacggcctccggcaccgccatccccatcgggggcgggagcgccaacgtgtacgtgaacctggcgccgtgcgtcaacgtgggccagaactgcgtggtcgacctgtccacccagatcttctgccacaacgactaccccgagaccatcacggactacgtgaccctccagcgggggagcgcctacggcggcgtgctgtccagcttctccgggaccgtcaagtacagcggctccagctaccccttccccaccacgtccgagaccccgcgcgtggtgtacaacagccggaccgacaagccctggcccgtcgccctgtacctcacccccgtgtccagcgccgggggcgtggcgatcaaggccgggtccctgatcgccgtcctgatcctccgccagacgaacaactacaacagcgacgacttccagttcgtgtggaacatctacgccaacaacgacgtggtcgtgccgaccggcggctgcgacgtgtccgcccgggacgtcaccgtgaccctgcccgactaccccgggagcgtgcccatcccgctgacggtctactgcgcgaagtcccagaacctcggctactacctgagcgggaccaccgccgacgccggcaacagcatcttcaccaacacggcctccttcagccccgcccagggcgtgggggtccagctgacccgccagggcaccatcatccccgcgaacaacaccgtgtccctcggggccgtgggcacgagcgccgtctccctggggctgaccgccaactacgcccggaccggcggccaggtgaccgcggggaacgtgcagagcatcatcggcgtcacgttcgtgtaccagcccggggacggcaacgccgacgtgaccatcaccgtcaacgggaaggtggtggccaagtccggcggcatgcagatctacgaggggaagctcaccgccgagggcctgcgcttcgggatcgtcgccagccggttcaaccacgcgctggtggaccgcctcgtggagggcgccatcgacgccatcgtccggcacgggggccgcgaggaggacatcacgctggtgcgggtgccgggctcctgggagatccccgtcgccgcgggggagctggcccgcaaggaggacatcgacgccgtgatcgccatcggcgtgctcatccgcggggccacgccccacttcgactacatcgcgagcgaggtctccaagggcctggccgacctgagcctcgagctgcggaagcccatcaccttcggcgtgatcaccgccgacaccctggagcaggccatcgagcgggccgggaccaagcacggcaacaaggggtgggaggcggccctctccgccatcgagatggccaacctgttcaagagcctgcgctgatgatgaggactagtccctgttcccagagcccacttttttttctttttttgaaataaaatagcctgtctttcagatctcaaaggctcttttcagagccaccaaaaaaaaaaaaaaaaaaaaaaaaaaaaaaaaaaaaaaaaaaaaaaaaaaaaaaaaaaaaaaaaaaaaaaaaaaaaaaaaaaaaaaaaaaaaaaaaaaaaa

SEQ ID NO: 866 - RNA, 1700 nt, synthetic construct
  misc_feature 1..1700: note Artificial____HsIgE(1-18)_Ec(J96)-FimH(22-300_F165V)_Linker -PGDGN_Ec(J96)-FimG(24-37)_Linker-SGG_LumSynth(1-154_C37A_N 102D) mRNA opt1
  source 1..1700: mol_type = other RNA
aggagagtcccgcagtcggcgtccagcggctctgcttgttcgtgtgtgtgtcgttgcaggccttattcaagcttaccatggactggacctggatcctgttcctcgtggccgccgcgacccgcgtccacagcttcgcctgcaagacggccaacggcaccgccatccccatcgggggcgggtccgccaacgtgtacgtgaacctggcgccggtcgtgaacgtgggccagaacctggtcgtggacctcagcacccagatcttctgccacaacgactaccccgagaccatcacggactacgtgaccctgcagcgggggtccgcctacggcggcgtcctgagcaacttctccgggaccgtgaagtacagcggctccagctaccccttccccaccacgtccgagaccccgcgcgtggtctacaacagccggaccgacaagccctggcccgtggccctctacctgacccccgtgtccagcgccgggggcgtcgcgatcaaggccgggtccctgatcgccgtgctcatcctgcgccagacgaacaactacaacagcgacgacttccaggtggtctggaacatctacgccaacaacgacgtggtggtcccgaccggcggctgcgacgtgtccgcccgggacgtgaccgtcaccctgcccgactaccccgggagcgtgcccatcccgctcacggtctactgcgcgaagtcccagaacctgggctactacctgagcgggaccaccgccgacgccggcaactccatcttcaccaacacggccagcttcagccccgcccagggcgtgggggtgcagctcacccgcaacggcaccatcatccccgcgaacaacaccgtctccctgggggccgtgggcacgagcgccgtgtccctggggctcaccgccaactacgcccggaccggcggccaggtcaccgcggggaacgtgcagagcatcatcggcgtgacgttcgtctaccagcccggggacggcaacgccgacgtgaccatcaccgtgaacgggaaggtcgtggccaagtccggcggcatgcagatctacgaggggaagctgaccgccgagggcctgcgcttcgggatcgtggccagccggttcaaccacgcgctcgtcgaccgcctggtggagggcgccatcgacgccatcgtgcggcacgggggccgcgaggaggacatcacgctggtccgggtgccgggctcctgggagatccccgtggccgcgggggagctcgcccgcaaggaggacatcgacgccgtcatcgccatcggcgtgctgatccgcggggccacgccccacttcgactacatcgcgagcgaggtgtccaagggcctggccgacctcagcctggagctgcggaagcccatcaccttcggcgtcatcaccgccgacaccctcgagcaggccatcgagcgggccgggaccaagcacggcaacaaggggtgggaggcggccctgtccgccatcgagatggccaacctgttcaagagcctccgctgatgatgaggactagtccctgttcccagagcccacttttttttctttttttgaaataaaatagcctgtctttcagatctcaaaggctcttttcagagccaccaaaaaaaaaaaaaaaaaaaaaaaaaaaaaaaaaaaaaaaaaaaaaaaaaaaaaaaaaaaaaaaaaaaaaaaaaaaaaaaaaaaaaaaaaaaaaaaaaaaaa

SEQ ID NO: 867 - RNA, 1727 nt, synthetic construct
  misc_feature 1..1727: note Artificial____HsIgE(1-18)_Ec(J96)-FimH(22-300_N28S_N91S_N24 9Q)_Linker-PGDGN_Ec(J96)-FimG(24-37)_Linker-SGG_Ferritin(5- 167_N19Q) mRNA opt1
  source 1..1727: mol_type = other RNA
aggagagtcccgcagtcggcgtccagcggctctgcttgttcgtgtgtgtgtcgttgcaggccttattcaagcttaccatggactggacctggatcctgttcctcgtggccgccgcgacccgcgtccacagcttcgcctgcaagacggcctccggcaccgccatccccatcgggggcgggagcgccaacgtgtacgtgaacctggcgccggtcgtgaacgtgggccagaacctggtcgtggacctctccacccagatcttctgccacaacgactaccccgagaccatcacggactacgtgaccctgcagcgggggagcgcctacggcggcgtcctgtccagcttctccgggaccgtgaagtacagcggctccagctaccccttccccaccacgtccgagaccccgcgcgtggtctacaacagccggaccgacaagccctggcccgtggccctctacctgacccccgtgtccagcgccgggggcgtcgcgatcaaggccgggtccctgatcgccgtgctcatcctgcgccagacgaacaactacaacagcgacgacttccagttcgtgtggaacatctacgccaacaacgacgtcgtggtgccgaccggcggctgcgacgtctccgcccgggacgtgaccgtgaccctgcccgactaccccgggagcgtccccatcccgctcacggtgtactgcgcgaagtcccagaacctgggctactacctgagcgggaccaccgccgacgccggcaacagcatcttcaccaacacggcctccttcagccccgcccagggcgtcggggtgcagctcacccgccagggcaccatcatccccgcgaacaacaccgtgtccctgggggccgtcggcacgagcgccgtgtccctggggctcaccgccaactacgcccggaccggcggccaggtgaccgcggggaacgtccagagcatcatcggcgtgacgttcgtgtaccagcccggggacggcaacgccgacgtcaccatcaccgtgaacgggaaggtggtcgccaagtccggcggcgacatcatcaagctgctgaacgagcaggtcaacaaggagatgcagagctccaacctctacatgagcatgtccagctggtgctacacccactccctggacggggccggcctgttcctcttcgaccacgccgcggaggagtacgagcacgccaagaagctgatcatcttcctgaacgagaacaacgtgccggtgcagctcacgagcatctccgcccccgagcacaagttcgaggggctgacccagatcttccagaaggcctacgagcacgagcagcacatcagcgagtccatcaacaacatcgtggaccacgcgatcaagagcaaggaccacgccaccttcaacttcctgcagtggtacgtggccgagcagcacgaggaggaggtcctcttcaaggacatcctggacaagatcgagctgatcggcaacgagaaccacgggctctacctggccgaccagtacgtgaagggcatcgccaagtcccgcaagagctgatgatgaggactagtccctgttcccagagcccacttttttttctttttttgaaataaaatagcctgtctttcagatctcaaaggctcttttcagagccaccaaaaaaaaaaaaaaaaaaaaaaaaaaaaaaaaaaaaaaaaaaaaaaaaaaaaaaaaaaaaaaaaaaaaaaaaaaaaaaaaaaaaaaaaaaaaaaaaaaaaa

SEQ ID NO: 868 - RNA, 1727 nt, synthetic construct
  misc_feature 1..1727: note Artificial____HsIgE(1-18)_Ec(J96)-FimH(22-300_N28S_N91S_N24 9Q_N256D)_Linker-PGDGN_Ec(J96)-FimG(24-37)_Linker-SGG_Ferri tin(5-167_N19Q) mRNA opt1
  source 1..1727: mol_type = other RNA
aggagagtcccgcagtcggcgtccagcggctctgcttgttcgtgtgtgtgtcgttgcaggccttattcaagcttaccatggactggacctggatcctgttcctcgtggccgccgcgacccgcgtccacagcttcgcctgcaagacggcctccggcaccgccatccccatcgggggcgggagcgccaacgtgtacgtgaacctggcgccggtcgtgaacgtgggccagaacctggtcgtggacctctccacccagatcttctgccacaacgactaccccgagaccatcacggactacgtgaccctgcagcgggggagcgcctacggcggcgtcctgtccagcttctccgggaccgtgaagtacagcggctccagctaccccttccccaccacgtccgagaccccgcgcgtggtctacaacagccggaccgacaagccctggcccgtggccctctacctgacccccgtgtccagcgccgggggcgtcgcgatcaaggccgggtccctgatcgccgtgctcatcctgcgccagacgaacaactacaacagcgacgacttccagttcgtgtggaacatctacgccaacaacgacgtcgtggtgccgaccggcggctgcgacgtctccgcccgggacgtgaccgtgaccctgcccgactaccccgggagcgtccccatcccgctcacggtgtactgcgcgaagtcccagaacctgggctactacctgagcgggaccaccgccgacgccggcaacagcatcttcaccaacacggcctccttcagccccgcccagggcgtcggggtgcagctcacccgccagggcaccatcatccccgcggacaacaccgtgtccctgggggccgtcggcacgagcgccgtgtccctggggctcaccgccaactacgcccggaccggcggccaggtgaccgcggggaacgtccagagcatcatcggcgtgacgttcgtgtaccagcccggggacggcaacgccgacgtcaccatcaccgtgaacgggaaggtggtcgccaagtccggcggcgacatcatcaagctgctgaacgagcaggtcaacaaggagatgcagagctccaacctctacatgagcatgtccagctggtgctacacccactccctggacggggccggcctgttcctcttcgaccacgccgcggaggagtacgagcacgccaagaagctgatcatcttcctgaacgagaacaacgtgccggtgcagctcacgagcatctccgcccccgagcacaagttcgaggggctgacccagatcttccagaaggcctacgagcacgagcagcacatcagcgagtccatcaacaacatcgtggaccacgcgatcaagagcaaggaccacgccaccttcaacttcctgcagtggtacgtggccgagcagcacgaggaggaggtcctcttcaaggacatcctggacaagatcgagctgatcggcaacgagaaccacgggctctacctggccgaccagtacgtgaagggcatcgccaagtcccgcaagagctgatgatgaggactagtccctgttcccagagcccacttttttttctttttttgaaataaaatagcctgtctttcagatctcaaaggctcttttcagagccaccaaaaaaaaaaaaaaaaaaaaaaaaaaaaaaaaaaaaaaaaaaaaaaaaaaaaaaaaaaaaaaaaaaaaaaaaaaaaaaaaaaaaaaaaaaaaaaaaaaaaa

SEQ ID NO: 869 - RNA, 1727 nt, synthetic construct
  misc_feature 1..1727: note Artificial____HsIgE(1-18)_Ec(J96)-FimH(22-300_N28S_V48C_L55 C_N91S_N249Q)_Linker-PGDGN_Ec(J96)-FimG(24-37)_Linker-SGG_F erritin(5-167_N19Q) mRNA opt1
  source 1..1727: mol_type = other RNA
aggagagtcccgcagtcggcgtccagcggctctgcttgttcgtgtgtgtgtcgttgcaggccttattcaagcttaccatggactggacctggatcctgttcctcgtggccgccgcgacccgcgtccacagcttcgcctgcaagacggcctccggcaccgccatccccatcgggggcgggagcgccaacgtgtacgtgaacctggcgccgtgcgtcaacgtgggccagaactgcgtggtcgacctgtccacccagatcttctgccacaacgactaccccgagaccatcacggactacgtgaccctccagcgggggagcgcctacggcggcgtgctgtccagcttctccgggaccgtcaagtacagcggctccagctaccccttccccaccacgtccgagaccccgcgcgtggtgtacaacagccggaccgacaagccctggcccgtcgccctgtacctcacccccgtgtccagcgccgggggcgtggcgatcaaggccgggtccctgatcgccgtcctgatcctccgccagacgaacaactacaacagcgacgacttccagttcgtgtggaacatctacgccaacaacgacgtggtcgtgccgaccggcggctgcgacgtgtccgcccgggacgtcaccgtgaccctgcccgactaccccgggagcgtgcccatcccgctgacggtctactgcgcgaagtcccagaacctcggctactacctgagcgggaccaccgccgacgccggcaacagcatcttcaccaacacggcctccttcagccccgcccagggcgtgggggtccagctgacccgccagggcaccatcatccccgcgaacaacaccgtgtccctcggggccgtgggcacgagcgccgtctccctggggctgaccgccaactacgcccggaccggcggccaggtgaccgcggggaacgtgcagagcatcatcggcgtcacgttcgtgtaccagcccggggacggcaacgccgacgtgaccatcaccgtcaacgggaaggtggtggccaagtccggcggcgacatcatcaagctcctgaacgagcaggtcaacaaggagatgcagagctccaacctgtacatgagcatgtccagctggtgctacacccactccctcgacggggccggcctgttcctgttcgaccacgccgcggaggagtacgagcacgccaagaagctcatcatcttcctgaacgagaacaacgtgccggtgcagctgacgagcatctccgcccccgagcacaagttcgaggggctcacccagatcttccagaaggcctacgagcacgagcagcacatcagcgagtccatcaacaacatcgtcgaccacgcgatcaagagcaaggaccacgccaccttcaacttcctgcagtggtacgtggccgagcagcacgaggaggaggtgctgttcaaggacatcctcgacaagatcgagctgatcggcaacgagaaccacgggctgtacctcgccgaccagtacgtcaagggcatcgccaagtcccgcaagagctgatgatgaggactagtccctgttcccagagcccacttttttttctttttttgaaataaaatagcctgtctttcagatctcaaaggctcttttcagagccaccaaaaaaaaaaaaaaaaaaaaaaaaaaaaaaaaaaaaaaaaaaaaaaaaaaaaaaaaaaaaaaaaaaaaaaaaaaaaaaaaaaaaaaaaaaaaaaaaaaaaa

SEQ ID NO: 870 - RNA, 1727 nt, synthetic construct
  misc_feature 1..1727: note Artificial____HsIgE(1-18)_Ec(J96)-FimH(22-300_F165V)_Linker -PGDGN_Ec(J96)-FimG(24-37)_Linker-SGG_Ferritin(5-167_N19Q) mRNA opt1
  source 1..1727: mol_type = other RNA
aggagagtcccgcagtcggcgtccagcggctctgcttgttcgtgtgtgtgtcgttgcaggccttattcaagcttaccatggactggacctggatcctgttcctcgtggccgccgcgacccgcgtgcacagcttcgcctgcaagacggccaacggcaccgccatccccatcgggggcgggtccgccaacgtgtacgtgaacctggcgccggtcgtgaacgtgggccagaacctggtcgtggacctcagcacccagatcttctgccacaacgactaccccgagaccatcacggactacgtgaccctgcagcgggggtccgcctacggcggcgtcctgagcaacttctccgggaccgtgaagtacagcggctccagctaccccttccccaccacgtccgagaccccgcgcgtggtctacaacagccggaccgacaagccctggcccgtggccctctacctgacccccgtgtccagcgccgggggcgtcgcgatcaaggccgggtccctgatcgccgtgctcatcctgcgccagacgaacaactacaacagcgacgacttccaggtggtctggaacatctacgccaacaacgacgtggtggtcccgaccggcggctgcgacgtgtccgcccgggacgtgaccgtcaccctgcccgactaccccgggagcgtgcccatcccgctcacggtctactgcgcgaagtcccagaacctgggctactacctgagcgggaccaccgccgacgccggcaactccatcttcaccaacacggccagcttcagccccgcccagggcgtgggggtgcagctcacccgcaacggcaccatcatccccgcgaacaacaccgtctccctgggggccgtgggcacgagcgccgtgtccctggggctcaccgccaactacgcccggaccggcggccaggtcaccgcggggaacgtgcagagcatcatcggcgtgacgttcgtctaccagcccggggacggcaacgccgacgtgaccatcaccgtgaacgggaaggtcgtggccaagtccggcggcgacatcatcaagctgctgaacgagcaggtcaacaaggagatgcagagctccaacctctacatgagcatgtccagctggtgctacacccactccctggacggggccggcctgttcctcttcgaccacgccgcggaggagtacgagcacgccaagaagctgatcatcttcctgaacgagaacaacgtgccggtgcagctcacgagcatctccgcccccgagcacaagttcgaggggctgacccagatcttccagaaggcctacgagcacgagcagcacatcagcgagtccatcaacaacatcgtggaccacgcgatcaagagcaaggaccacgccaccttcaacttcctgcagtggtacgtcgccgagcagcacgaggaggaggtcctcttcaaggacatcctggacaagatcgagctgatcggcaacgagaaccacgggctctacctggccgaccagtacgtgaagggcatcgccaagtcccgcaagagctgatgatgaggactagtccctgttcccagagcccacttttttttctttttttgaaataaaatagcctgtctttcagatctcaaaggctcttttcagagccaccaaaaaaaaaaaaaaaaaaaaaaaaaaaaaaaaaaaaaaaaaaaaaaaaaaaaaaaaaaaaaaaaaaaaaaaaaaaaaaaaaaaaaaaaaaaaaaaaaaaaa

SEQ ID NO: 871 - RNA, 1004 nt, synthetic construct
  misc_feature 1..1004: note Artificial____Ec(J96)-FimC(1-36)_Ec(J96)-FimC(37-241) mRNA opt3
  source 1..1004: mol_type = other RNA
aggagagtcccgcagtcggcgtccagcggctctgcttgttcgtgtgtgtgtcgttgcaggccttattcaagcttaccatgagcaacaagaatgtgaacgtcagaaaatcccaggagatcaccttctgcctgctcgccggcattcttatgtttatggctatgatggttgcagggagggccgaagcgggagtggctctgggtgccacacgggtaatataccccgcaggccaaaaacaggtgcagttggccgtcactaataacgacgaaaattctacgtatttaatccagtcatgggtggagaacgctgatggggttaaggacggacgcttcattgtgacccctccactgtttgcaatgaagggcaaaaaggagaatacactacgaatcctcgatgccactaacaatcaactgccgcaggaccgtgaaagtcttttctggatgaacgtcaaggctattcccagcatggataaatccaagctgaccgagaatacattgcagctcgccatcatatctagaatcaaactgtactataggcctgcgaagctggcactcccacccgaccaggccgctgagaaattacggtttcgcagatcggccaactcactgacccttattaatcctactccatactatttgacagtgaccgaactgaacgcaggtacgagggtactagagaatgctctcgttccccctatgggggaaagcactgtgaagctgccaagtgatgccggatccaacatcacctaccggacaattaacgactatggcgcgcttactccgaagatgaccggcgtcatggagtgatgatgaggactagtccctgttcccagagcccacttttttttctttttttgaaataaaatagcctgtctttcagatctcaaaggctcttttcagagccaccaaaaaaaaaaaaaaaaaaaaaaaaaaaaaaaaaaaaaaaaaaaaaaaaaaaaaaaaaaaaaaaaaaaaaaaaaaaaaaaaaaaaaaaaaaaaaaaaaaaaa

SEQ ID NO: 872 - RNA, 950 nt, synthetic construct
  misc_feature 1..950: note = Artificial____HsIgE(1-18)_Ec(J96)-FimC(37-241) mRNA opt3
  source 1..950: mol_type = other RNA
aggagagtcccgcagtcggcgtccagcggctctgcttgttcgtgtgtgtgtcgttgcaggccttattcaagcttaccatggactggacctggatcctgttcctcgtggccgctgcaacaagagtccacagcggcgttgcccttggggcgactagggtgatttaccccgctggacagaagcaagtacagctggccgtgacgaacaatgatgagaactccacctatttgatacagtcttgggtcgaaaatgcagacggtgtgaaagatggccggtttatcgttacacctccattattcgccatgaaggggaaaaaggagaacactctgcgcattctagacgctaccaataaccagctcccgcaagatcgagaatcactgttttggatgaatgtgaaagcaatccccagtatggacaagagcaaacttacagagaacaccctgcagttggccattatctcccgtataaagctctactatagacctgctaagctggccctgccacccgatcaggcggcagaaaaactcaggttccggcgctctgccaattcgttaactctgatcaaccctacaccatactatcttaccgtcacggagttgaatgctggaactagagtgctggagaacgccctagtaccccctatgggcgaatcaaccgttaagctcccaagcgacgcaggtagtaatattacatacaggactatcaacgattatggggctctgaccccgaaaatgacaggagtgatggagtgatgatgaggactagtccctgttcccagagcccacttttttttctttttttgaaataaaatagcctgtctttcagatctcaaaggctcttttcagagccaccaaaaaaaaaaaaaaaaaaaaaaaaaaaaaaaaaaaaaaaaaaaaaaaaaaaaaaaaaaaaaaaaaaaaaaaaaaaaaaaaaaaaaaaaaaaaaaaaaaaaa

SEQ ID NO: 873 - RNA, 1181 nt, synthetic construct
  misc_feature 1..1181: note Artificial____Ec(J96)-FimH(1-21)_Ec(J96)-FimH(22-300) mRNA opt3
  source 1..1181: mol_type = other RNA
aggagagtcccgcagtcggcgtccagcggctctgcttgttcgtgtgtgtgtcgttgcaggccttattcaagcttaccatgaagagagtgatcaccctgttcgccgtcctccttatgggctggagcgttaacgcttggtcctttgcatgcaaaacagccaatgggactgcgattcccataggaggtggctctgctaacgtgtacgtaaatctggcccctgtggtcaacgtggggcagaatttggttgtggacttatcaacgcaaatcttctgtcacaacgattatccagagaccattacagactacgtcactctgcagaggggaagtgcatatggcggtgtgctaagcaatttttccgggaccgtaaagtactctggatcgtcatatccgttccccacaaccagcgaaactcctcgggttgtgtacaacagtcgcacagataaaccatggcccgtcgccctctatctgacccctgtgtcctctgctggcggcgtggcaatcaaggccgggagccttattgctgtcctgatcttgcgacagacgaataactacaattccgacgattttcagttcgtttggaacatatacgccaataacgacgtggtagtgccaactggaggttgcgatgtctcagcgcgtgacgtgaccgttacactccccgattatcctggcagtgtgccaatcccgctgactgtctactgtgcaaaaagccaaaatctggggtattacctctctggaaccacagccgacgctggcaactccatttttaccaacacggcctcattcagccccgcacagggtgtgggggtacagttaactagaaatggaacaatcattcctgctaacaataccgttagtctgggcgccgtgggcacttctgcggtctcccttgggttgacagccaactatgcaaggaccggaggtcaggtgacggctggcaatgtccaaagcatcataggggtgacctttgtttaccagtgatgatgaggactagtccctgttcccagagcccacttttttttctttttttgaaataaaatagcctgtctttcagatctcaaaggctcttttcagagccaccaaaaaaaaaaaaaaaaaaaaaaaaaaaaaaaaaaaaaaaaaaaaaaaaaaaaaaaaaaaaaaaaaaaaaaaaaaaaaaaaaaaaaaaaaaaaaaaaaaaaa

SEQ ID NO: 874 - RNA, 1172 nt, synthetic construct
  misc_feature 1..1172: note = Artificial____HsIgE(1-18)_Ec(J96)-FimH(22-300) mRNA opt3
  source 1..1172: mol_type = other RNA
aggagagtcccgcagtcggcgtccagcggctctgcttgttcgtgtgtgtgtcgttgcaggccttattcaagcttaccatggactggacctggatcctgttcctcgtggccgctgcaacaagagtccacagctttgcctgcaagactgcgaacggcacggctattcccatagggggaggttccgccaatgtttacgtgaaccttgcacctgtagtgaatgtcggccagaacctggtggttgatttgtctacccaaatcttctgtcataatgactatccagagacaattactgattacgtgaccttacagagggggtcagcctatggaggcgtcctgagtaactttagcggtacagtgaaatactccgggtcttcgtatccgttccccaccacttcagaaacacctcgggtagtttacaatagccgcaccgacaagccatggcccgtggctctatatctcacgcctgtcagttccgcaggaggcgtggccatcaaagctggctctctgattgccgtgcttatcctgcgacagactaacaattacaacagcgatgactttcagttcgtctggaatatatacgcgaacaatgatgttgtggtaccaaccgggggatgcgacgtgtccgcacgtgatgtcacagtgactttgcccgactatcctggttcagttccaatcccgctcaccgtgtactgtgccaagagtcaaaacctgggctattacctgagcgggacaaccgctgatgccggaaattctatttttacgaacactgcatccttctcacccgctcagggcgtcggtgtgcagctcacaagaaacgggaccatcattcctgccaataacactgttagcttaggagcggtaggcacaagtgccgtgtctctgggccttaccgcaaattatgctaggaccgggggacaggtcacggccggtaacgtgcaatccatcataggcgtcacatttgtgtaccagtgatgatgaggactagtccctgttcccagagcccacttttttttctttttttgaaataaaatagcctgtctttcagatctcaaaggctcttttcagagccaccaaaaaaaaaaaaaaaaaaaaaaaaaaaaaaaaaaaaaaaaaaaaaaaaaaaaaaaaaaaaaaaaaaaaaaaaaaaaaaaaaaaaaaaaaaaaaaaaaaaaa

SEQ ID NO: 875 - RNA, 1178 nt, synthetic construct
  misc_feature 1..1178: note = Artificial____MmIgK(1-20)_Ec(J96)-FimH(22-300) mRNA opt3
  source 1..1178: mol_type = other RNA
aggagagtcccgcagtcggcgtccagcggctctgcttgttcgtgtgtgtgtcgttgcaggccttattcaagcttaccatggagaccgacacactgctcctttgggtgctgttgttatgggtccccggcagcactgggttcgcctgcaagacggctaacggaaccgcaatccctattggtggcgggtccgccaatgtttacgtgaacctggcgccagtagtgaatgtcggacagaacctagtggttgatctctctacacaaatattttgtcacaatgactatccggaaactatcaccgattacgtgacactgcagagaggctcagcttatggtggggtccttagtaacttcagcggaaccgtgaaatactccggctcatcgtatccctttcctactacatcagagaccccaagggtagtttacaatagccggacggacaagccctggcctgtggccctgtatttgactccagtcagttccgcaggcggggtggccattaaagctggatctctcatcgcagtgctgattctgcgccagaccaacaattacaacagcgatgacttccagtttgtctggaatatctacgccaacaatgatgttgtggtacccacaggtggctgcgacgtgtccgctcgagatgtcactgtgaccctccctgactatccagggtcagttccgatacccttaacagtgtactgtgccaagagtcaaaacctgggatattaccttagcggcaccacggcggatgcaggtaattctatcttcactaacacagcctccttttctcctgctcagggggtcggagtgcagttgacccgtaacggcactattatcccagccaataacacagtaagcctgggcgcagttgggaccagtgctgtgtctctaggactcacggccaattatgcgagaaccggtggccaggtcacagccgggaacgtgcaatccattatcggagtcactttcgtgtaccagtgatgatgaggactagtccctgttcccagagcccacttttttttctttttttgaaataaaatagcctgtctttcagatctcaaaggctcttttcagagccaccaaaaaaaaaaaaaaaaaaaaaaaaaaaaaaaaaaaaaaaaaaaaaaaaaaaaaaaaaaaaaaaaaaaaaaaaaaaaaaaaaaaaaaaaaaaaaaaaaaaaa

SEQ ID NO: 876 - RNA, 1238 nt, synthetic construct
  misc_feature 1..1238: note Artificial____Ec(J96)-FimH(1-21)_Ec(J96)-FimH(22-300)_Linke r-PGDGN_Ec(J96)-FimG(24-37) mRNA opt3
  source 1..1238: mol_type = other RNA
aggagagtcccgcagtcggcgtccagcggctctgcttgttcgtgtgtgtgtcgttgcaggccttattcaagcttaccatgaagagagtgatcaccctgttcgccgtcctccttatgggctggagcgttaacgcttggtcctttgcatgcaaaacagccaatgggactgcgattcccataggaggtggctctgctaacgtgtacgtaaatctggcccctgtggtcaacgtggggcagaatttggttgtggacttatcaacgcaaatcttctgtcacaacgattatccagagaccattacagactacgtcactctgcagaggggaagtgcatatggcggtgtgctaagcaatttttccgggaccgtaaagtactctggatcgtcatatccgttccccacaaccagcgaaactcctcgggttgtgtacaacagtcgcacagataaaccatggcccgtcgccctctatctgacccctgtgtcctctgctggcggcgtggcaatcaaggccgggagccttattgctgtcctgatcttgcgacagacgaataactacaattccgacgattttcagttcgtttggaacatatacgccaataacgacgtggtagtgccaactggaggttgcgatgtctcagcgcgtgacgtgaccgttacactccccgattatcctggcagtgtgccaatcccgctgactgtctactgtgcaaaaagccaaaatctggggtattacctctctggaaccacagccgacgctggcaactccatttttaccaacacggcctcattcagccccgcacagggtgtgggggtacagttaactagaaatggaacaatcattcctgctaacaataccgttagtctgggcgccgtgggcacttctgcggtctcccttgggttgacagccaactatgcaaggaccggaggtcaggtgacggctggcaatgtccaaagcatcataggggtgacctttgtttaccagccaggagatggcaacgccgacgtgacaattactgtaaatggtaaggtcgtggctaagtgatgatgaggactagtccctgttcccagagcccacttttttttctttttttgaaataaaatagcctgtctttcagatctcaaaggctcttttcagagccaccaaaaaaaaaaaaaaaaaaaaaaaaaaaaaaaaaaaaaaaaaaaaaaaaaaaaaaaaaaaaaaaaaaaaaaaaaaaaaaaaaaaaaaaaaaaaaaaaaaaaa

SEQ ID NO: 877 - RNA, 1229 nt, synthetic construct
  misc_feature 1..1229: note Artificial____HsIgE(1-18)_Ec(J96)-FimH(22-300)_Linker-PGDGN _Ec(J96)-FimG(24-37) mRNA opt3
  source 1..1229: mol_type = other RNA
aggagagtcccgcagtcggcgtccagcggctctgcttgttcgtgtgtgtgtcgttgcaggccttattcaagcttaccatggactggacctggatcctgttcctcgtggccgctgcaacaagagtccacagctttgcctgcaagactgcgaacggcacggctattcccatagggggaggttccgccaatgtttacgtgaaccttgcacctgtagtgaatgtcggccagaacctggtggttgatttgtctacccaaatcttctgtcataatgactatccagagacaattactgattacgtgaccttacagagggggtcagcctatggaggcgtcctgagtaactttagcggtacagtgaaatactccgggtcttcgtatccgttccccaccacttcagaaacacctcgggtagtttacaatagccgcaccgacaagccatggcccgtggctctatatctcacgcctgtcagttccgcaggaggcgtggccatcaaagctggctctctgattgccgtgcttatcctgcgacagactaacaattacaacagcgatgactttcagttcgtctggaatatatacgcgaacaatgatgttgtggtaccaaccgggggatgcgacgtgtccgcacgtgatgtcacagtgactttgcccgactatcctggttcagttccaatcccgctcaccgtgtactgtgccaagagtcaaaacctgggctattacctgagcgggacaaccgctgatgccggaaattctatttttacgaacactgcatccttctcacccgctcagggcgtcggtgtgcagctcacaagaaacgggaccatcattcctgccaataacactgttagcttaggagcggtaggcacaagtgccgtgtctctgggccttaccgcaaattatgctaggaccgggggacaggtcacggccggtaacgtgcaatccatcataggcgtcacatttgtgtaccagccaggggacggaaatgctgatgttactattaccgtgaacggcaaagtagtcgccaagtgatgatgaggactagtccctgttcccagagcccacttttttttctttttttgaaataaaatagcctgtctttcagatctcaaaggctcttttcagagccaccaaaaaaaaaaaaaaaaaaaaaaaaaaaaaaaaaaaaaaaaaaaaaaaaaaaaaaaaaaaaaaaaaaaaaaaaaaaaaaaaaaaaaaaaaaaaaaaaaaaaa

SEQ ID NO: 878 - RNA, 1235 nt, synthetic construct
  misc_feature 1..1235: note Artificial____HsIgE(1-18)_Ec(J96)-FimH(22-300)_Linker-G4SGG _Ec(J96)-FimG(24-37) mRNA opt3
  source 1..1235: mol_type = other RNA
aggagagtcccgcagtcggcgtccagcggctctgcttgttcgtgtgtgtgtcgttgcaggccttattcaagcttaccatggactggacctggatcctgttcctcgtggccgctgcaacaagagtccacagctttgcctgcaagactgcgaacggcacggctattcccatagggggaggttccgccaatgtttacgtgaaccttgcacctgtagtgaatgtcggccagaacctggtggttgatttgtctacccagatcttctgtcataatgactatccagagacaattactgattacgtgaccttacagagggggtcagcctatggaggcgtcctgagtaactttagcggtacagtgaaatactccgggtcttcgtatccgttccccaccacttcagaaacacctcgggtagtttacaatagccgcaccgacaagccatggcccgtggctctatatctcacgcctgtcagttccgcaggaggcgtggccatcaaagctggctctctgattgccgtgcttatcctgcgacagactaacaattacaacagcgatgactttcagttcgtctggaatatatacgcgaacaatgatgttgtggtaccaaccgggggatgcgacgtgtccgcacgtgatgtcacagtgactttgcccgactatcctggttcagttccaatcccgctcaccgtgtactgtgccaagagtcaaaacctgggctattacctgagcgggacaaccgctgatgccggaaattctatttttacgaacactgcatccttctcacccgctcagggcgtcggtgtgcagctcacaagaaacgggaccatcattcctgccaataacactgttagcttaggagcggtaggcacaagtgccgtgtctctgggccttaccgcaaattatgctaggaccgggggacaggtcacggccggtaacgtgcaatccatcataggcgtcacatttgtgtaccaagggggaggcggtagcgggggcgctgacgttactattaccgtgaatggaaaagtagtcgccaagtgatgatgaggactagtccctgttcccagagcccacttttttttctttttttgaaataaaatagcctgtctttcagatctcaaaggctcttttcagagccaccaaaaaaaaaaaaaaaaaaaaaaaaaaaaaaaaaaaaaaaaaaaaaaaaaaaaaaaaaaaaaaaaaaaaaaaaaaaaaaaaaaaaaaaaaaaaaaaaaaaaa

SEQ ID NO: 879 - RNA, 1235 nt, synthetic construct
  misc_feature 1..1235: note Artificial____MmIgK(1-20)_Ec(J96)-FimH(22-300)_Linker-PGDGN _Ec(J96)-FimG(24-37) mRNA opt3
  source 1..1235: mol_type = other RNA
aggagagtcccgcagtcggcgtccagcggctctgcttgttcgtgtgtgtgtcgttgcaggccttattcaagcttaccatggagaccgacacactgctcctttgggtgctgttgttatgggtccccggcagcactgggttcgcctgcaagacggctaacggaaccgcaatccctattggtggcgggtccgccaatgtttacgtgaacctggcgccagtagtgaatgtcggacagaacctagtggttgatctctctacacaaatattttgtcacaatgactatccggaaactatcaccgattacgtgacactgcagagaggctcagcttatggtggggtccttagtaacttcagcggaaccgtgaaatactccggctcatcgtatccctttcctactacatcagagaccccaagggtagtttacaatagccggacggacaagccctggcctgtggccctgtatttgactccagtcagttccgcaggcggggtggccattaaagctggatctctcatcgcagtgctgattctgcgccagaccaacaattacaacagcgatgacttccagtttgtctggaatatctacgccaacaatgatgttgtggtacccacaggtggctgcgacgtgtccgctcgagatgtcactgtgaccctccctgactatccagggtcagttccgatacccttaacagtgtactgtgccaagagtcaaaacctgggatattaccttagcggcaccacggcggatgcaggtaattctatcttcactaacacagcctccttttctcctgctcagggggtcggagtgcagttgacccgtaacggcactattatcccagccaataacacagtaagcctgggcgcagttgggaccagtgctgtgtctctaggactcacggccaattatgcgagaaccggtggccaggtcacagccgggaacgtgcaatccattatcggagtcactttcgtgtaccagcccggcgacggtaatgcagatgttaccataacagtgaacgggaaagtagtcgctaagtgatgatgaggactagtccctgttcccagagcccacttttttttctttttttgaaataaaatagcctgtctttcagatctcaaaggctcttttcagagccaccaaaaaaaaaaaaaaaaaaaaaaaaaaaaaaaaaaaaaaaaaaaaaaaaaaaaaaaaaaaaaaaaaaaaaaaaaaaaaaaaaaaaaaaaaaaaaaaaaaaaa

SEQ ID NO: 880 - RNA, 1235 nt, synthetic construct
  misc_feature 1..1235: note Artificial____MmIgK(1-20)_Ec(536)-FimH(22-300)_Linker-PGDGN _Ec(J96)-FimG(24-37) mRNA opt3
  source 1..1235: mol_type = other RNA
aggagagtcccgcagtcggcgtccagcggctctgcttgttcgtgtgtgtgtcgttgcaggccttattcaagcttaccatggagaccgacacactgctcctttgggtgctgttgttatgggtccccggcagcactgggttcgcctgcaagacggctaacggaaccgcaatccctattggtggcgggtccgccaatgtttacgtgaacctggcgccagctgtaaatgtgggacagaacctagtcgtggatctctctacacaaatattttgtcacaatgactatccggaaactatcaccgattacgttacactgcagagaggctcagcctatggtggggtgcttagtagcttctccggaaccgtcaaatacaacggctcatcgtatccctttcctactacatcagagaccccaagggtggtatacaatagccggacggacaagccctggcctgttgcactgtatttgactccagtgagttccgccggcggggtcgctattaaagcaggatctctcatcgccgtgctgattctgcgccagaccaacaattacaacagcgatgacttccagtttgtgtggaatatctacgctaacaatgatgtcgttgtgcccacaggtggctgcgacgtatccgcccgagatgtgactgtcaccctccctgactatccagggtcagtgccgatacccttaacagtttactgtgcgaagagtcaaaacctgggatattaccttagcggcaccacggcagatgccggtaattctatcttcactaacacagcttccttttctcctgcccagggggtgggagtccagttgacccgtaacggcactattatcccagcaaataacacagtgagcctgggcgctgtagggaccagtgccgtttctctaggactcacggcgaattatgccagaaccggtggccaggtgacagcagggaacgtccaatccattatcggagtgactttcgtctaccagcccggcgacggtaatgctgatgtgaccataacagttaacgggaaagtggtagccaagtgatgatgaggactagtccctgttcccagagcccacttttttttctttttttgaaataaaatagcctgtctttcagatctcaaaggctcttttcagagccaccaaaaaaaaaaaaaaaaaaaaaaaaaaaaaaaaaaaaaaaaaaaaaaaaaaaaaaaaaaaaaaaaaaaaaaaaaaaaaaaaaaaaaaaaaaaaaaaaaaaaa

SEQ ID NO: 881 - RNA, 1259 nt, synthetic construct
  misc_feature 1..1259: note Artificial____HsIgE(1-18)_Ec(J96)-FimH(22-300)_Linker-(G4S) 3_Ec(J96)-FimC(135-148) mRNA opt3
  source 1..1259: mol_type = other RNA
aggagagtcccgcagtcggcgtccagcggctctgcttgttcgtgtgtgtgtcgttgcaggccttattcaagcttaccatggactggacctggatcctgttcctcgtggccgctgcaacaagagtccacagctttgcctgcaagactgcgaacggcacggctattcccatagggggaggttccgccaatgtttacgtgaaccttgcacctgtagtgaatgtcggccagaacctggtggttgatttgtctacccagatcttctgtcataatgactatccagagacaattactgattacgtgaccttacagagggggtcagcctatggaggcgtcctgagtaactttagcggtacagtgaaatactccgggtcttcgtatccgttccccaccacttcagaaacacctcgggtagtttacaatagccgcaccgacaagccatggcccgtggctctatatctcacgcctgtcagttccgcaggaggcgtggccatcaaagctggctctctgattgccgtgcttatcctgcgacagactaacaattacaacagcgatgactttcagttcgtctggaatatatacgcgaacaatgatgttgtggtaccaaccgggggatgcgacgtgtccgcacgtgatgtcacagtgactttgcccgactatcctggttcagttccaatcccgctcaccgtgtactgtgccaagagtcaaaacctgggctattacctgagcgggacaaccgctgatgccggaaattctatttttacgaacactgcatccttctcacccgctcagggcgtcggtgtgcagctcacaagaaacgggaccatcattcctgccaataacactgtatcgttaggagcggttggcacaagtgccgtgtctctgggccttaccgcaaattatgctaggaccgggggacaggtcacggccggtaacgtgcaatccatcataggcgtcacatttgtgtaccaagggggaggcggtagcgggggcggaggcagcgggggaggtggctctactgagaataccttgcagctggctattatctcccggattaaatgatgatgaggactagtccctgttcccagagcccacttttttttctttttttgaaataaaatagcctgtctttcagatctcaaaggctcttttcagagccaccaaaaaaaaaaaaaaaaaaaaaaaaaaaaaaaaaaaaaaaaaaaaaaaaaaaaaaaaaaaaaaaaaaaaaaaaaaaaaaaaaaaaaaaaaaaaaaaaaaaaa

SEQ ID NO: 882 - RNA, 1682 nt, synthetic construct
  misc_feature 1..1682: note Artificial____LumSynth(1-154_C37A_N102D)_Linker(GGS)4-GGG_E c(J96)-FimH(22-300)_Linker-PGDGN_Ec(J96)-FimG(24-37) mRNA opt3
  source 1..1682: mol_type = other RNA
aggagagtcccgcagtcggcgtccagcggctctgcttgttcgtgtgtgtgtcgttgcaggccttattcaagcttaccatgcagatctacgagggcaagctgaccgccgaagggctcagattcggaattgtggctagcaggtttaaccacgcacttgtcgaccggctggttgagggtgccatagatgcgatcgtgcgccatggcgggcgagaagaggacattacattggtacgtgtgcccggatcctgggaaatccctgtcgctgccggcgagttagcaagaaaagaggatattgacgccgtgatcgctataggtgttctgatcaggggagcaactccacacttcgattatattgcctctgaagtgtcaaaggggctagctgacctcagtctggagcttcggaaaccgatcacgtttggcgtcattaccgccgatacactggaacaagcgatcgagcgcgcaggcactaagcatgggaataaaggatgggaggccgctttgagcgccatagaaatggcaaacctcttcaagtccctgagaggtggctctgggggatcgggcggttcagggggaagcggcggcgggtttgcttgcaagaccgccaatggaacagcgattcccatcggtggcgggagtgccaacgtgtacgtaaatctggcacctgttgtgaacgtcggacagaatctcgtggtggacttatccacccagattttctgtcacaacgattatccagagactatcacagactacgtcaccctgcagaggggctctgcttatggtggggttcttagcaatttttccggcacggtgaaatactcaggaagtagctatcccttccctactacctctgaaacaccacgggtagtgtacaactcccgcactgataagccctggcctgtcgccttgtacctgaccccagtgtcaagcgctggcggggttgccatcaaagcaggaagtctaattgccgtgctcatactgcgacaaacaaataactataattctgacgattttcagttcgtctggaacatctacgctaataacgacgtggtagttccgaccggtggctgcgacgtgtccgcgagagatgtcacggtgactcttcccgactatcctgggagcgtcccaattcccctgacagtgtactgtgcaaagtcgcagaacttgggatattacctctctggcaccactgccgatgctggtaattccatctttacaaacaccgcctcattcagtcctgcacagggggttggcgtgcaactgacgaggaatggaaccataattccagccaacaatacagtcagcttaggcgctgtagggacttccgccgtgtctctgggactcaccgcaaactatgcgcggacaggtggccaggttactgctgggaatgtgcagagcatcatcggagtcacctttgtgtaccagcccggcgacggtaacgccgatgtaacaattaccgtgaatgggaaagttgtcgcaaagtgatgatgaggactagtccctgttcccagagcccacttttttttctttttttgaaataaaatagcctgtctttcagatctcaaaggctcttttcagagccaccaaaaaaaaaaaaaaaaaaaaaaaaaaaaaaaaaaaaaaaaaaaaaaaaaaaaaaaaaaaaaaaaaaaaaaaaaaaaaaaaaaaaaaaaaaaaaaaaaaaaa

SEQ ID NO: 883 - RNA, 1700 nt, synthetic construct
  misc_feature 1..1700: note Artificial____HsIgE(1-18)_Ec(J96)-FimH(22-300)_Linker-PGDGN _Ec(J96)-FimG(24-37)_Linker-SGG_LumSynth(1-154_C37A_N102D) mRNA opt3
  source 1..1700: mol_type = other RNA
aggagagtcccgcagtcggcgtccagcggctctgcttgttcgtgtgtgtgtcgttgcaggccttattcaagcttaccatggactggacctggatcctgttcctcgtggccgctgcaacaagagtccacagctttgcctgcaagactgcgaacggcacggctattcccatagggggaggttccgccaatgtttacgtgaaccttgcacctgtagtgaatgtcggccagaacctggtggttgatttgtctacccaaatcttctgtcataatgactatccagagacaattactgattacgtgaccttacagagggggtcagcctatggaggcgtcctgagtaactttagcggtacagtgaaatactccgggtcttcgtatccgttccccaccacttcagaaacacctcgggtagtttacaatagccgcaccgacaagccatggcccgtggctctatatctcacgcctgtcagttccgcaggaggcgtggccatcaaagctggctctctgattgccgtgcttatcctgcgacagactaacaattacaacagcgatgactttcagttcgtctggaatatatacgcgaacaatgatgttgtggtaccaaccgggggatgcgacgtgtccgcacgtgatgtcacagtgactttgcccgactatcctggttcagttccaatcccgctcaccgtgtactgtgccaagagtcaaaacctgggctattacctgagcgggacaaccgctgatgccggaaattctatttttacgaacactgcatccttctcacccgctcagggcgtcggtgtgcagctcacaagaaacgggaccatcattcctgccaataacactgttagcttaggagcggtaggcacaagtgccgtgtctctgggccttaccgcaaattatgctaggaccgggggacaggtcacggccggtaacgtgcaatccatcataggcgtcacatttgtgtaccagccaggggacggaaatgctgatgttactattaccgtgaacggcaaagtagtcgccaagagcggtgggatgcagatctatgagggcaagttgacagcagaaggactgcggttcggcattgtggcctcgcgctttaatcacgctctagttgacagactcgtggagggggcgatcgacgcaatcgtcaggcatggaggtcgggaagaggatattactctggtgcgcgtacccggctcttgggagatacctgtggccgctggggaacttgcccgaaaagaggacatcgatgcagttattgccatcggagtcctgataagaggcgctaccccacacttcgactacattgcctccgaagtgtcaaagggtttggcagatctcagtctggagttaaggaaacccatcacatttggggtgatcaccgcggacactctggagcaggctattgaacgggccggcacgaagcatggaaacaaaggctgggaggcagccctcagcgctatcgaaatggccaatcttttcaagtccctgcgttgatgatgaggactagtccctgttcccagagcccacttttttttctttttttgaaataaaatagcctgtctttcagatctcaaaggctcttttcagagccaccaaaaaaaaaaaaaaaaaaaaaaaaaaaaaaaaaaaaaaaaaaaaaaaaaaaaaaaaaaaaaaaaaaaaaaaaaaaaaaaaaaaaaaaaaaaaaaaaaaaaa

SEQ ID NO: 884 - RNA, 1727 nt, synthetic construct
  misc_feature 1..1727: note Artificial____HsIgE(1-18)_Ec(J96)-FimH(22-300)_Linker-PGDGN _Ec(J96)-FimG(24-37)_Linker-SGG_Ferritin(5-167_N19Q) mRNA opt3
  source 1..1727: mol_type = other RNA
aggagagtcccgcagtcggcgtccagcggctctgcttgttcgtgtgtgtgtcgttgcaggccttattcaagcttaccatggactggacctggatcctgttcctcgtggccgctgcaacaagagtccacagctttgcctgcaagactgcgaacggcacggctattcccatagggggaggttccgccaatgtttacgtgaaccttgcacctgtagtgaatgtcggccagaacctggtggttgatttgtctacccaaatcttctgtcataatgactatccagagacaattactgattacgtgaccttacagagggggtcagcctatggaggcgtcctgagtaactttagcggtacagtgaaatactccgggtcttcgtatccgttccccaccacttcagaaacacctcgggtagtttacaatagccgcaccgacaagccatggcccgtggctctatatctcacgcctgtcagttccgcaggaggcgtggccatcaaagctggctctctgattgccgtgcttatcctgcgacagactaacaattacaacagcgatgactttcagttcgtctggaatatatacgcgaacaatgatgttgtggtaccaaccgggggatgcgacgtgtccgcacgtgatgtcacagtgactttgcccgactatcctggttcagttccaatcccgctcaccgtgtactgtgccaagagtcaaaacctgggctattacctgagcgggacaaccgctgatgccggaaattctatttttacgaacactgcatccttctcacccgctcagggcgtcggtgtgcagctcacaagaaacgggaccatcattcctgccaataacactgtgagcttaggagcggttggcacaagtgccgtgtctctgggccttaccgcaaattatgctaggaccgggggacaggtcacggccggtaacgtgcaatccatcataggcgtcacatttgtgtaccagccaggggacggaaatgctgatgttactattaccgtgaacggcaaagtagtcgccaagagcggtggggacatcattaagttgctgaatgagcaggtaaacaaagaaatgcagtcgtctaatctatatatgtccatgtcaagttggtgctacacacacagcctcgacggcgcaggactgttcctttttgatcatgccgctgaggaatacgagcacgcgaagaaactgatcatcttcttgaacgagaataacgttcccgtgcaactcacttccatttctgcacctgaacataagtttgagggcctgacccagatattccagaaagcctatgaacacgagcaacacatcagcgagtcaattaataacatcgtcgaccatgctataaagagtaaggatcacgccacattcaactttttacagtggtacgtggcagaacagcatgaggaagaggtactgttcaaagacattctcgataagatcgaacttatcgggaatgagaaccacggactgtatttggccgaccagtacgtgaaaggtattgctaagtcccggaaaagctgatgatgaggactagtccctgttcccagagcccacttttttttctttttttgaaataaaatagcctgtctttcagatctcaaaggctcttttcagagccaccaaaaaaaaaaaaaaaaaaaaaaaaaaaaaaaaaaaaaaaaaaaaaaaaaaaaaaaaaaaaaaaaaaaaaaaaaaaaaaaaaaaaaaaaaaaaaaaaaaaaa

SEQ ID NO: 885 - RNA, 1757 nt, synthetic construct
  misc_feature 1..1757: note Artificial____MmIgK(1-20)_Ec(J96)-FimH(22-300)_Linker-PGDGN _Ec(J96)-FimG(24-37)_Linker-(GGS)4_Ferritin(5-166) mRNA opt3
  source 1..1757: mol_type = other RNA
aggagagtcccgcagtcggcgtccagcggctctgcttgttcgtgtgtgtgtcgttgcaggccttattcaagcttaccatggagaccgacacactgctcctttgggtgctgttgttatgggtccccggcagcactgggttcgcctgcaagacggctaacggaaccgcaatccctattggtggcgggtccgccaatgtttacgtgaacctggcgccagtagtgaatgtcggacagaacctagtggttgatctctctacacaaatattttgtcacaatgactatccggaaactatcaccgattacgtgacactgcagagaggctcagcttatggtggggtccttagtaacttcagcggaaccgtgaaatactccggctcatcgtatccctttcctactacatcagagaccccaagggtagtttacaatagccggacggacaagccctggcctgtggccctgtatttgactccagtcagttccgcaggcggggtggccattaaagctggatctctcatcgcagtgctgattctgcgccagaccaacaattacaacagcgatgacttccagtttgtctggaatatctacgccaacaatgatgttgtggtacccacaggtggctgcgacgtgtccgctcgagatgtcactgtgaccctccctgactatccagggtcagttccgatacccttaacagtgtactgtgccaagagtcaaaacctgggatattaccttagcggcaccacggcggatgcaggtaattctatcttcactaacacagcctccttttctcctgctcagggggtcggagtgcagttgacccgtaacggcactattatcccagccaataacacagtaagcctgggcgcagttgggaccagtgctgtgtctctaggactcacggccaattatgcgagaaccggtggccaggtcacagccgggaacgtgcaatccattatcggagtcactttcgtgtaccagcccggcgacggtaatgcagatgttaccataacagtgaacgggaaagtagtcgctaagggcggaagcggcgggtcgggaggttctggcgggtccgacattatcaagctgcttaatgaacaggtgaacaaagagatgaactcaagtaatctgtatatgagcatgtcctcttggtgctacactcatagcttggacggagccggcctctttctgttcgatcacgctgccgaagagtacgagcatgcaaagaaattaattatctttctgaatgaaaacaatgttcctgtgcagctcacctcaatcagtgccccagagcacaagttcgaaggtcttacacaaatttttcagaaggcttatgagcatgagcagcacatatccgaaagcatcaacaatattgtcgaccacgcgatcaaatctaaggatcatgcaaccttcaacttcctgcaatggtacgtggccgagcagcacgaagaggaagtattgtttaaagacatactagataagattgagctgatcgggaacgagaatcatggcctctatctggctgaccagtacgtgaaaggaatcgccaagtcaaggaaatgatgatgaggactagtccctgttcccagagcccacttttttttctttttttgaaataaaatagcctgtctttcagatctcaaaggctcttttcagagccaccaaaaaaaaaaaaaaaaaaaaaaaaaaaaaaaaaaaaaaaaaaaaaaaaaaaaaaaaaaaaaaaaaaaaaaaaaaaaaaaaaaaaaaaaaaaaaaaaaaaaa

SEQ ID NO: 886 - RNA, 1400 nt, synthetic construct
  misc_feature 1..1400: note Artificial____HsIgE(1-18)_Ec(J96)-FimH(22-300)_Linker-PGDGN _Ec(J96)-FimG(24-37)_TMdomain-HA(510-566) mRNA opt3
  source 1..1400: mol_type = other RNA
aggagagtcccgcagtcggcgtccagcggctctgcttgttcgtgtgtgtgtcgttgcaggccttattcaagcttaccatggactggacctggatcctgttcctcgtggccgctgcaacaagagtccacagctttgcctgcaagactgcgaacggcacggctattcccatagggggaggttccgccaatgtttacgtgaaccttgcacctgtagtgaatgtcggccagaacctggtggttgatttgtctacccaaatcttctgtcataatgactatccagagacaattactgattacgtgaccttacagagggggtcagcctatggaggcgtcctgagtaactttagcggtacagtgaaatactccgggtcttcgtatccgttccccaccacttcagaaacacctcgggtagtttacaatagccgcaccgacaagccatggcccgtggctctatatctcacgcctgtcagttccgcaggaggcgtggccatcaaagctggctctctgattgccgtgcttatcctgcgacagactaacaattacaacagcgatgactttcagttcgtctggaatatatacgcgaacaatgatgttgtggtaccaaccgggggatgcgacgtgtccgcacgtgatgtcacagtgactttgcccgactatcctggttcagttccaatcccgctcaccgtgtactgtgccaagagtcaaaacctgggctattacctgagcgggacaaccgctgatgccggaaattctatttttacgaacactgcatccttctcacccgctcagggcgtcggtgtgcagctcacaagaaacgggaccatcattcctgccaataacactgttagcttaggagcggtaggcacaagtgccgtgtctctgggccttaccgcaaattatgctaggaccgggggacaggtcacggccggtaacgtgcaatccatcataggcgtcacatttgtgtaccagccaggggacggaaatgctgatgttactattaccgtgaacggcaaagtagtcgccaaggcaaagttgaatcgggaggaaatcgacggtgtgaaactggagagcacacgcatttatcagatcctagccatctactcgactgttgcttcttccctcgtgctggtcgtgtcacttggggcgattagtttctggatgtgcagcaacggctccctgcagtgtagaatatgcatctgatgatgaggactagtccctgttcccagagcccacttttttttctttttttgaaataaaatagcctgtctttcagatctcaaaggctcttttcagagccaccaaaaaaaaaaaaaaaaaaaaaaaaaaaaaaaaaaaaaaaaaaaaaaaaaaaaaaaaaaaaaaaaaaaaaaaaaaaaaaaaaaaaaaaaaaaaaaaaaaaaa

SEQ ID NO: 887 - RNA, 1733 nt, synthetic construct
  misc_feature 1..1733: note Artificial____HsIgE(1-18)_LumSynth(1-154_C37A_N102D)_Linker (GGS)4-GGG_Ec(J96)-FimH(22-300)_Linker-PGDGN_Ec(J96)-FimG(2 4-37) mRNA opt3
  source 1..1733: mol_type = other RNA
aggagagtcccgcagtcggcgtccagcggctctgcttgttcgtgtgtgtgtcgttgcaggccttattcaagcttaccatggactggacctggatcctgttcctcgtggccgctgcaacaagagtccacagccagatttacgagggcaaacttactgccgaagggctgaggtttggaatagttgcgtcccggttcaaccatgctttggtggatcgcttagtagagggtgccatcgacgcaattgtgcgacacggcgggcgtgaagaggatatcacgctggtcagagtgcccggatcttgggaaattcctgttgccgctggcgagctagcaaggaaggaggacatcgatgccgtgatagctatcggtgtcctcattcgcggggccaccccacattttgactatatcgcgtcagaagtgagtaagggactggcagatcttagcctggagttgcggaaaccgattacattcggcgtaatcactgccgacaccctcgaacaagctatagagagagccggcacaaagcacgggaataaaggatgggaggcagctctgtccgccattgaaatggcgaacctgtttaagtctctcaggggtggctcagggggatcgggcggtagcgggggaagtggcggcgggttcgcctgcaagaccgcaaatggaactgctatccccattggtggcgggtccgccaacgtttacgtgaatttagctcctgtcgtgaacgtgggacagaatctggtcgttgatctttctacacagatcttttgtcataacgactatccagagaccatcacggattacgtgactttgcagcggggcagcgcctatggtggggtactgtccaatttctcaggcaccgtgaaatacagtggaagctcttatccctttcctacaacttccgaaaccccacgcgtcgtgtacaactcacgaacagacaagccctggcctgttgcactatacctcaccccagtgagcagtgccggcggggtcgctattaaagcgggatctctgatagcagtgcttatcctgagacaaacgaataactataattccgatgacttccagtttgtatggaacatttacgccaataacgacgttgtggtcccgactggtggctgcgatgtgagcgctagggacgtcacagtgaccttgcccgattatcctgggtcggttccaatccccctcactgtgtactgtgccaagtctcagaacctgggatattacttatccggcacaaccgcagacgccggtaattcaatattcacgaacaccgctagttttagccctgcccagggggtaggcgtccaactgacacggaatggaactattatcccagcaaacaataccgtgtccctcggcgcggttgggacatctgctgtgagccttggactgactgccaactatgcacgtaccggtggccaggtcacagccgggaatgtgcagtcaatcattggagtaaccttcgtgtaccagcccggcgatggtaacgctgacgttactatcacggtcaatgggaaagtggtggccaagtgatgatgaggactagtccctgttcccagagcccacttttttttctttttttgaaataaaatagcctgtctttcagatctcaaaggctcttttcagagccaccaaaaaaaaaaaaaaaaaaaaaaaaaaaaaaaaaaaaaaaaaaaaaaaaaaaaaaaaaaaaaaaaaaaaaaaaaaaaaaaaaaaaaaaaaaaaaaaaaaaaa

SEQ ID NO: 888 - RNA, 1700 nt, synthetic construct
  misc_feature 1..1700: note Artificial____HsIgE(1-18)_Ec(J96)-FimH(22-300_N28S_N91S_N24 9Q)_Linker-PGDGN_Ec(J96)-FimG(24-37)_Linker-SGG_LumSynth(1- 154_C37A_N102D) mRNA opt3
  source 1..1700: mol_type = other RNA
aggagagtcccgcagtcggcgtccagcggctctgcttgttcgtgtgtgtgtcgttgcaggccttattcaagcttaccatggactggacctggatcctgttcctcgtggccgctgcaacaagagtccacagctttgcctgcaagactgcgtccggcacggctattcccatagggggaggttctgccaacgtttacgtgaatcttgcacctgtagtgaacgtcggccagaatctggtggttgatttgtcaacccaaatcttctgtcataacgactatccagagacaattactgattacgtgaccttacagagggggagtgcctatggaggcgtcctgagctccttttctggtacagtgaaatactcggggtcaagctatccgttccccaccacgagtgaaacacctcgggtagtttacaattcccgcaccgacaagccatggcccgtggctctatatctcacgcctgtctctagcgcaggaggcgtggccatcaaagctggctccctgattgccgtgcttatcctgcgacagactaacaattacaactcagatgactttcagttcgtctggaatatatacgcgaacaatgatgttgtggtaccaaccgggggatgcgacgtgagtgcacgtgatgtcacagtgactttgcccgactatcctggtagcgttccaatcccgctcaccgtgtactgtgccaagtctcaaaacctgggctattacctgtccgggacaaccgctgatgccggaaattcaatttttacgaacactgctagcttcagtcccgcacagggcgtcggtgtgcagctcacaagacaggggaccatcattcctgccaataacactgtatctttaggagcggttggcacatccgccgtgagcctgggccttaccgcaaactatgctaggactgggggacaagtcaccgccggtaatgtgcagtcgatcataggcgtcacatttgtgtaccagccaggggacggaaacgctgatgttactattaccgtgaatggcaaagtagtcgccaagtctggtgggatgcagatctatgagggcaagttgacagcagaaggactgcggttcggcattgtggcctcccgctttaaccacgctctagttgacagactcgtggagggggcgatcgacgcaatcgtcaggcatggaggtcgggaagaggatattactctggtgcgcgtacccggctcatgggagatacctgtggccgctggggaacttgcccgaaaagaggacatcgatgcagttattgccatcggagtcctgataagaggcgctaccccacacttcgactacattgccagtgaagtgagcaagggtttggcagatctctccctggagttaaggaaacccatcacatttggggtgatcaccgcggacactctggagcaagctattgaacgggccggcacgaagcatggaaataaaggctgggaggcagccctctctgctatcgaaatggccaaccttttcaagagcctgcgttgatgatgaggactagtccctgttcccagagcccacttttttttctttttttgaaataaaatagcctgtctttcagatctcaaaggctcttttcagagccaccaaaaaaaaaaaaaaaaaaaaaaaaaaaaaaaaaaaaaaaaaaaaaaaaaaaaaaaaaaaaaaaaaaaaaaaaaaaaaaaaaaaaaaaaaaaaaaaaaaaaa

SEQ ID NO: 889 - RNA, 1700 nt, synthetic construct
  misc_feature 1..1700: note Artificial____HsIgE(1-18)_Ec(J96)-FimH(22-300_N28S_N91S_N24 9Q_N256D)_Linker-PGDGN_Ec(J96)-FimG(24-37)_Linker-SGG_LumSy nth(1-154_C37A_N102D) mRNA opt3
  source 1..1700: mol_type = other RNA
aggagagtcccgcagtcggcgtccagcggctctgcttgttcgtgtgtgtgtcgttgcaggccttattcaagcttaccatggactggacctggatcctgttcctcgtggccgctgcaacaagagtccacagctttgcctgcaagactgcgtccggcacggctattcccatagggggaggttctgccaacgtttacgtgaatcttgcacctgtagtgaacgtcggccagaatctggtggttgatttgtcaacccaaatcttctgtcataacgactatccagagacaattactgattacgtgaccttacagagggggagtgcctatggaggcgtcctgagctccttttctggtacagtgaaatactcggggtcaagctatccgttccccaccacgagtgaaacacctcgggtagtttacaattcccgcaccgacaagccatggcccgtggctctatatctcacgcctgtctctagcgcaggaggcgtggccatcaaagctggctccctgattgccgtgcttatcctgcgacagactaacaattacaactcagatgactttcagttcgtctggaatatatacgcgaacaatgatgttgtggtaccaaccgggggatgcgacgtgagtgcacgtgatgtcacagtgactttgcccgactatcctggtagcgttccaatcccgctcaccgtgtactgtgccaagtctcaaaacctgggctattacctgtccgggacaaccgctgatgccggaaattcaatttttacgaacactgctagcttcagtcccgcacagggcgtcggtgtgcagctcacaagacaggggaccatcattcctgccgacaatactgtatctttaggagcggttggcacatccgccgtgagcctgggccttaccgcaaactatgctaggactgggggacaagtcaccgccggtaacgtgcagtcgatcataggcgtcacatttgtgtaccagccaggggatggaaatgctgacgttactattaccgtgaacggcaaagtagtcgccaagtctggtgggatgcagatctatgagggcaagttgacagcagaaggactgcggttcggcattgtggcctcccgctttaatcacgctctagttgacagactcgtggagggggcgatcgatgcaatcgtcaggcatggaggtcgggaagaggacattactctggtgcgcgtacccggctcatgggagatacctgtggccgctggggaacttgcccgaaaagaggatatcgacgcagttattgccatcggagtcctgataagaggcgctaccccacacttcgattacattgccagtgaagtgagcaagggtttggcagacctctccctggagttaaggaaacccatcacatttggggtgatcaccgcggatactctggagcaagctattgaacgggccggcacgaagcatggaaacaaaggctgggaggcagccctctctgctatcgaaatggccaatcttttcaagagcctgcgttgatgatgaggactagtccctgttcccagagcccacttttttttctttttttgaaataaaatagcctgtctttcagatctcaaaggctcttttcagagccaccaaaaaaaaaaaaaaaaaaaaaaaaaaaaaaaaaaaaaaaaaaaaaaaaaaaaaaaaaaaaaaaaaaaaaaaaaaaaaaaaaaaaaaaaaaaaaaaaaaaaa

SEQ ID NO: 890 - RNA, 1700 nt, synthetic construct
  misc_feature 1..1700: note Artificial____HsIgE(1-18)_Ec(J96)-FimH(22-300_N28S_V48C_L55 C_N91S_N249Q)_Linker-PGDGN_Ec(J96)-FimG(24-37)_Linker-SGG_L umSynth(1-154_C37A_N102D) mRNA opt3
  source 1..1700: mol_type = other RNA
aggagagtcccgcagtcggcgtccagcggctctgcttgttcgtgtgtgtgtcgttgcaggccttattcaagcttaccatggactggacctggatcctgttcctcgtggccgctgcaacaagagtccacagctttgcctgcaagactgcgtccggcacggctattcccatagggggaggttctgccaacgtttacgtgaatcttgcaccttgtgtaaacgtgggccagaattgcgtcgtggatctgtcaacccaaatcttctgtcataacgactatccagagacaattactgattacgttaccttgcagagggggagtgcctatggaggcgtgttaagctccttttctggtacagtcaaatactcggggtcaagctatccgttccccaccacgagtgaaacacctcgggtggtatacaattcccgcaccgacaagccatggcccgttgctctgtatctaacgcctgtgtctagcgcaggaggcgtcgccatcaaagctggctccctcattgccgtgctgatccttcgacagactaacaattacaactcagatgactttcagttcgtgtggaatatatacgcgaacaatgatgtcgttgtgccaaccgggggatgcgacgtaagtgcacgtgatgtgacagtcactctgcccgactatcctggtagcgtgccaatcccgttgaccgtttactgtgccaagtctcaaaacctcggctattacctgtccgggacaaccgctgatgccggaaattcaatttttacgaacactgctagcttcagtcccgcacagggcgtgggtgtccagctgacaagacaggggaccatcattcctgccaataacactgtgtctctcggagcggtaggcacatccgccgttagcttaggcctgaccgcaaactatgctaggactgggggacaagtgaccgccggtaatgtccagtcgatcataggcgtgacatttgtctaccagccaggggacggaaacgctgatgtgactattaccgttaatggcaaagtggtagccaagtctggtgggatgcagatctatgagggcaagctaacagcagaaggattgcggttcggcattgtcgcctcccgctttaaccacgctctggtggacagacttgttgagggggcgatcgacgcaatcgtgaggcatggaggtcgggaagaggatattactctcgtccgcgtgcccggctcatgggagatacctgtagccgctggggaactggcccgaaaagaggacatcgatgcagtgattgccatcggagttcttataagaggcgctaccccacacttcgactacattgccagtgaagtcagcaagggtctggcagatttgtccctcgagctgaggaaacccatcacatttggggtgatcaccgcggacactttagagcaagctattgaacgggccggcacgaagcatggaaataaaggctgggaggcagccctgtctgctatcgaaatggccaacctcttcaagagccttcgttgatgatgaggactagtccctgttcccagagcccacttttttttctttttttgaaataaaatagcctgtctttcagatctcaaaggctcttttcagagccaccaaaaaaaaaaaaaaaaaaaaaaaaaaaaaaaaaaaaaaaaaaaaaaaaaaaaaaaaaaaaaaaaaaaaaaaaaaaaaaaaaaaaaaaaaaaaaaaaaaaaa

SEQ ID NO: 891 - RNA, 1700 nt, synthetic construct
  misc_feature 1..1700: note Artificial____HsIgE(1-18)_Ec(J96)-FimH(22-300_F165V)_Linker -PGDGN_Ec(J96)-FimG(24-37)_Linker-SGG_LumSynth(1-154_C37A_N 102D) mRNA opt3
  source 1..1700: mol_type = other RNA
aggagagtcccgcagtcggcgtccagcggctctgcttgttcgtgtgtgtgtcgttgcaggccttattcaagcttaccatggactggacctggatcctgttcctcgtggccgctgcaacaagagtccacagctttgcctgcaagactgcgaacggcacggctattcccatagggggaggttccgccaatgtttacgtgaaccttgcacctgtagtgaatgtcggccagaacctggtggttgatttgtctacccaaatcttctgtcataatgactatccagagacaattactgattacgtgaccttacagagggggtcagcctatggaggcgtcctgagtaactttagcggtacagtgaaatactccgggtcttcgtatccgttccccaccacttcagaaacacctcgggtagtttacaatagccgcaccgacaagccatggcccgtggctctatatctcacgcctgtcagttccgcaggaggcgtggccatcaaagctggctctctgattgccgtgcttatcctgcgacagactaacaattacaacagcgatgactttcaggtcgtttggaatatatacgcgaacaatgatgtggtagtgccaaccgggggatgcgacgtctccgcacgtgatgtgacagttactttgcccgactatcctggttcagtgccaatcccgctcaccgtctactgtgccaagagtcaaaacctgggctattacctgagcgggacaaccgctgatgccggaaattctattttcacgaacactgcatccttttcacccgctcagggcgtgggtgtacagctcacaagaaacgggaccatcattcctgccaataacactgttagcttaggagcggtgggcacaagtgccgtctctctgggccttaccgcaaattatgctaggaccgggggacaggtgacggccggtaacgtccaatccatcataggcgtgacattcgtttaccagccaggggacggaaatgctgatgtgactattaccgtaaacggcaaagtcgtggccaagagcggtgggatgcagatctatgagggcaagttgacagcagaaggactgcggtttggcattgttgcctcgcgcttcaatcacgctctagtggacagactcgtcgagggggcgatcgacgcaatcgtgaggcatggaggtcgggaagaggatattactctggtacgcgtgcccggctcttgggagatacctgttgccgctggggaacttgcccgaaaagaggacatcgatgcagtcattgccatcggagtgctgataagaggcgctaccccacactttgactacattgcctccgaagtgtcaaagggtttggcagatctcagtctggagttaaggaaacccatcacattcggggtcatcaccgcggacactctggagcaggctattgaacgggccggcacgaagcatggaaacaaaggctgggaggcagccctcagcgctatcgaaatggccaatctttttaagtccctgcgttgatgatgaggactagtccctgttcccagagcccacttttttttctttttttgaaataaaatagcctgtctttcagatctcaaaggctcttttcagagccaccaaaaaaaaaaaaaaaaaaaaaaaaaaaaaaaaaaaaaaaaaaaaaaaaaaaaaaaaaaaaaaaaaaaaaaaaaaaaaaaaaaaaaaaaaaaaaaaaaaaaa

SEQ ID NO: 892 - RNA, 1727 nt, synthetic construct
  misc_feature 1..1727: note Artificial____HsIgE(1-18)_Ec(J96)-FimH(22-300_N28S_N91S_N24 9Q)_Linker-PGDGN_Ec(J96)-FimG(24-37)_Linker-SGG_Ferritin(5- 167_N19Q) mRNA opt3
  source 1..1727: mol_type = other RNA
aggagagtcccgcagtcggcgtccagcggctctgcttgttcgtgtgtgtgtcgttgcaggccttattcaagcttaccatggactggacctggatcctgttcctcgtggccgctgcaacaagagtccacagctttgcctgcaagactgcgtccggcacggctattcccatagggggaggttctgccaacgtttacgtgaatcttgcacctgtagtgaacgtcggccagaatctggtggttgatttgtcaacccaaatcttctgtcataacgactatccagagacaattactgattacgtgaccttacagagggggagtgcctatggaggcgtcctgagctccttttctggtacagtgaaatactcggggtcaagctatccgttccccaccacgagtgaaacacctcgggtagtttacaattcccgcaccgacaagccatggcccgtggctctatatctcacgcctgtctctagcgcaggaggcgtggccatcaaagctggctccctgattgccgtgcttatcctgcgacagactaacaattacaactcagatgactttcagttcgtctggaatatatacgcgaacaatgatgttgtggtaccaaccgggggatgcgacgtgagtgcacgtgatgtcacagtgactttgcccgactatcctggtagcgttccaatcccgctcaccgtgtactgtgccaagtctcaaaacctgggctattacctgtccgggacaaccgctgatgccggaaattcaatttttacgaacactgctagcttcagtcccgcacagggcgtcggtgtgcagctcacaagacaggggaccatcattcctgccaataacactgtatctttaggagcggttggcacatccgccgtgagcctgggccttaccgcaaactatgctaggactgggggacaagtcaccgccggtaatgtgcagtcgatcataggcgtcacatttgtgtaccagccaggggacggaaacgctgatgttactattaccgtgaatggcaaagtagtcgccaagtctggtggggacatcattaagttgctgaacgaacaggtgaataaagagatgcaatcctcaaacctatatatgagtatgagctcctggtgctacacacactctctcgacggcgcaggactgttcctttttgatcatgccgctgaggaatacgagcacgcgaagaaactgatcatcttcttgaatgagaacaatgttcccgtgcagctcactagcatttcagcacctgaacataagtttgagggcctgacccagatattccaaaaagcctatgaacacgagcagcacatcagtgagtccattaacaatatcgtcgaccatgctataaagagcaaggatcacgccacattcaactttttacagtggtacgtggcagaacagcatgaggaagaggtactgttcaaagacattctcgataagatcgaacttatcgggaatgagaaccacggactgtatttggccgaccaatacgtgaaaggtattgctaagtctcggaaatcatgatgatgaggactagtccctgttcccagagcccacttttttttctttttttgaaataaaatagcctgtctttcagatctcaaaggctcttttcagagccaccaaaaaaaaaaaaaaaaaaaaaaaaaaaaaaaaaaaaaaaaaaaaaaaaaaaaaaaaaaaaaaaaaaaaaaaaaaaaaaaaaaaaaaaaaaaaaaaaaaaaa

SEQ ID NO: 893 - RNA, 1727 nt, synthetic construct
  misc_feature 1..1727: note Artificial____HsIgE(1-18)_Ec(J96)-FimH(22-300_N28S_N91S_N24 9Q_N256D)_Linker-PGDGN_Ec(J96)-FimG(24-37)_Linker-SGG_Ferri tin(5-167_N19Q) mRNA opt3
  source 1..1727: mol_type = other RNA
aggagagtcccgcagtcggcgtccagcggctctgcttgttcgtgtgtgtgtcgttgcaggccttattcaagcttaccatggactggacctggatcctgttcctcgtggccgctgcaacaagagtccacagctttgcctgcaagactgcgtccggcacggctattcccatagggggaggttctgccaacgtttacgtgaatcttgcacctgtagtgaacgtcggccagaatctggtggttgatttgtcaacccaaatcttctgtcataacgactatccagagacaattactgattacgtgaccttacagagggggagtgcctatggaggcgtcctgagctccttttctggtacagtgaaatactcggggtcaagctatccgttccccaccacgagtgaaacacctcgggtagtttacaattcccgcaccgacaagccatggcccgtggctctatatctcacgcctgtctctagcgcaggaggcgtggccatcaaagctggctccctgattgccgtgcttatcctgcgacagactaacaattacaactcagatgactttcagttcgtctggaatatatacgcgaacaatgatgttgtggtaccaaccgggggatgcgacgtgagtgcacgtgatgtcacagtgactttgcccgactatcctggtagcgttccaatcccgctcaccgtgtactgtgccaagtctcaaaacctgggctattacctgtccgggacaaccgctgatgccggaaattcaatttttacgaacactgctagcttcagtcccgcacagggcgtcggtgtgcagctcacaagacaggggaccatcattcctgccgacaatactgtatctttaggagcggttggcacatccgccgtgagcctgggccttaccgcaaactatgctaggactgggggacaagtcaccgccggtaacgtgcagtcgatcataggcgtcacatttgtgtaccagccaggggatggaaatgctgacgttactattaccgtgaacggcaaagtagtcgccaagtctggtggggacatcattaagttgctgaatgaacaggtgaacaaagagatgcaatcctcaaatctatatatgagtatgagctcctggtgctacacacactctctcgatggcgcaggactgttcctttttgaccatgccgctgaggaatacgagcacgcgaagaaactgatcatcttcttgaacgagaataacgttcccgtgcagctcactagcatttcagcacctgaacataagtttgagggcctgacccagatattccaaaaagcctatgaacacgagcagcacatcagtgagtccattaataacatcgtcgatcatgctataaagagcaaggaccacgccacattcaactttttacagtggtacgtggcagaacagcatgaggaagaggtactgttcaaagatattctcgacaagatcgaacttatcgggaatgagaatcacggactgtatttggccgatcaatacgtgaaaggtattgctaagtctcggaaatcatgatgatgaggactagtccctgttcccagagcccacttttttttctttttttgaaataaaatagcctgtctttcagatctcaaaggctcttttcagagccaccaaaaaaaaaaaaaaaaaaaaaaaaaaaaaaaaaaaaaaaaaaaaaaaaaaaaaaaaaaaaaaaaaaaaaaaaaaaaaaaaaaaaaaaaaaaaaaaaaaaaa

SEQ ID NO: 894 - RNA, 1727 nt, synthetic construct
  misc_feature 1..1727: note Artificial____HsIgE(1-18)_Ec(J96)-FimH(22-300_N28S_V48C_L55 C_N91S_N249Q)_Linker-PGDGN_Ec(J96)-FimG(24-37)_Linker-SGG_F erritin(5-167_N19Q) mRNA opt3
  source 1..1727: mol_type = other RNA
aggagagtcccgcagtcggcgtccagcggctctgcttgttcgtgtgtgtgtcgttgcaggccttattcaagcttaccatggactggacctggatcctgttcctcgtggccgctgcaacaagagtccacagctttgcctgcaagactgcgtccggcacggctattcccatagggggaggttctgccaacgtttacgtgaatcttgcaccttgtgtaaacgtgggccagaattgcgtcgtggatctgtcaacccaaatcttctgtcataacgactatccagagacaattactgattacgttaccttgcagagggggagtgcctatggaggcgtgttaagctccttttctggtacagtcaaatactcggggtcaagctatccgttccccaccacgagtgaaacacctcgggtggtatacaattcccgcaccgacaagccatggcccgttgctctgtatctaacgcctgtgtctagcgcaggaggcgtcgccatcaaagctggctccctcattgccgtgctgatccttcgacagactaacaattacaactcagatgactttcagttcgtgtggaatatatacgcgaacaatgatgtcgttgtgccaaccgggggatgcgacgtaagtgcacgtgatgtgacagtcactctgcccgactatcctggtagcgtgccaatcccgttgaccgtttactgtgccaagtctcaaaacctcggctattacctgtccgggacaaccgctgatgccggaaattcaatttttacgaacactgctagcttcagtcccgcacagggcgtgggtgtccagctgacaagacaggggaccatcattcctgccaataacactgtgtctctcggagcggtaggcacatccgccgttagcttaggcctgaccgcaaactatgctaggactgggggacaagtgaccgccggtaatgtccagtcgatcataggcgtgacatttgtctaccagccaggggacggaaacgctgatgtgactattaccgttaatggcaaagtggtagccaagtctggtggggacatcattaaacttttgaacgagcaggtcaataaggaaatgcaatcctcaaacctgtatatgagtatgagctcctggtgctacacacactctctagacggcgcaggactcttcctgtttgatcatgccgctgaggaatacgagcacgcgaagaaacttatcatcttcctgaatgagaacaatgtgcccgttcagttgactagcatttcagcacctgaacataagtttgagggcctcacccagatattccaaaaagcctatgaacacgagcagcacatcagtgagtccattaacaatatcgtggaccatgctataaagagcaaggatcacgccacattcaactttctgcagtggtacgtcgcagaacagcatgaggaagaggtgttattcaaagacattctggataagatcgaactcatcgggaatgagaaccacggactttatctggccgaccaatacgtaaaaggtattgctaagtctcggaaatcatgatgatgaggactagtccctgttcccagagcccacttttttttctttttttgaaataaaatagcctgtctttcagatctcaaaggctcttttcagagccaccaaaaaaaaaaaaaaaaaaaaaaaaaaaaaaaaaaaaaaaaaaaaaaaaaaaaaaaaaaaaaaaaaaaaaaaaaaaaaaaaaaaaaaaaaaaaaaaaaaaaa

SEQ ID NO: 895 - RNA, 1727 nt, synthetic construct
  misc_feature 1..1727: note Artificial____HsIgE(1-18)_Ec(J96)-FimH(22-300_F165V)_Linker -PGDGN_Ec(J96)-FimG(24-37)_Linker-SGG_Ferritin(5-167_N19Q) mRNA opt3
  source 1..1727: mol_type = other RNA
aggagagtcccgcagtcggcgtccagcggctctgcttgttcgtgtgtgtgtcgttgcaggccttattcaagcttaccatggactggacctggatcctgttcctcgtggccgctgcaacaagagtccacagctttgcctgcaagactgcgaacggcacggctattcccatagggggaggttccgccaatgtttacgtgaaccttgcacctgtagtgaatgtcggccagaacctggtggttgatttgtctacccaaatcttctgtcataatgactatccagagacaattactgattacgtgaccttacagagggggtcagcctatggaggcgtcctgagtaactttagcggtacagtgaaatactccgggtcttcgtatccgttccccaccacttcagaaacacctcgggtagtttacaatagccgcaccgacaagccatggcccgtggctctatatctcacgcctgtcagttccgcaggaggcgtggccatcaaagctggctctctgattgccgtgcttatcctgcgacagactaacaattacaacagcgatgactttcaggtcgtttggaatatatacgcgaacaatgatgtggtagtgccaaccgggggatgcgacgtctccgcacgtgatgtgacagttactttgcccgactatcctggttcagtgccaatcccgctcaccgtctactgtgccaagagtcaaaacctgggctattacctgagcgggacaaccgctgatgccggaaattctattttcacgaacactgcatccttttcacccgctcagggcgtgggtgtacagctcacaagaaacgggaccatcattcctgccaataacactgttagcttaggagcggtgggcacaagtgccgtctctctgggccttaccgcaaattatgctaggaccgggggacaggtgacggccggtaacgtccaatccatcataggcgtgacattcgtttaccagccaggggacggaaatgctgatgtgactattaccgtaaacggcaaagtcgtggccaagagcggtggggacatcattaagttgctgaatgagcaggttaacaaagaaatgcagtcgtctaatctatatatgtccatgtcaagttggtgctacacacacagcctcgacggcgcaggactgtttcttttcgatcatgccgctgaggaatacgagcacgcgaagaaactgatcatctttttgaacgagaataacgtgcccgtccaactcacttccatttctgcacctgaacataagttcgagggcctgacccagatatttcagaaagcctatgaacacgagcaacacatcagcgagtcaattaataacatcgtggaccatgctataaagagtaaggatcacgccacattcaatttcttacagtggtacgtagcagaacagcatgaggaagaggtgctgtttaaagacattctcgataagatcgaacttatcgggaacgagaaccacggactgtatttggccgaccagtacgttaaaggtattgctaagtcccggaaaagctgatgatgaggactagtccctgttcccagagcccacttttttttctttttttgaaataaaatagcctgtctttcagatctcaaaggctcttttcagagccaccaaaaaaaaaaaaaaaaaaaaaaaaaaaaaaaaaaaaaaaaaaaaaaaaaaaaaaaaaaaaaaaaaaaaaaaaaaaaaaaaaaaaaaaaaaaaaaaaaaaaa

SEQ ID NO: 896 - RNA, 1004 nt, synthetic construct
  misc_feature 1..1004: note Artificial____Ec(J96)-FimC(1-36)_Ec(J96)-FimC(37-241) mRNA opt3
  source 1..1004: mol_type = other RNA
aggagagtcccgcagtcggcgtccagcggctctgcttgttcgtgtgtgtgtcgttgcaggccttattcaagcttaccatgagcaacaagaacgtgaacgtgcggaagtcccaagagatcaccttctgtctgctggccggcatcctgatgtttatggccatgatggtggccggcagagccgaagctggtgttgctcttggagccaccagagtgatctacccagccggccagaaacaggtgcagctggccgtgaccaacaacgacgagaacagcacctacctgatccagagctgggtcgagaatgccgacggcgtgaaggacggcagattcatcgttacccctccactgttcgccatgaagggcaagaaagagaacaccctgcggatcctggacgccaccaacaatcagctgccccaggacagagaaagcctgttctggatgaacgtgaaggctatccccagcatggacaagagcaagctgaccgagaataccctgcagctcgccatcatcagccggatcaagctgtactacagacccgccaaactggccctgcctccagatcaggctgccgagaaactgcggttcagaagaagcgccaacagcctgacactgatcaaccccacaccttactacctgaccgtgaccgagctgaacgccggcacaagagtgctggaaaatgccctggttcctcctatgggcgagagcaccgtgaagctgccatctgatgccggctccaacatcacctaccggaccatcaacgactacggcgccctgacacctaagatgaccggcgtgatggaatgatgatgaggactagtccctgttcccagagcccacttttttttctttttttgaaataaaatagcctgtctttcagatctcaaaggctcttttcagagccaccaaaaaaaaaaaaaaaaaaaaaaaaaaaaaaaaaaaaaaaaaaaaaaaaaaaaaaaaaaaaaaaaaaaaaaaaaaaaaaaaaaaaaaaaaaaaaaaaaaaaa

SEQ ID NO: 897 - RNA, 950 nt, synthetic construct
  misc_feature 1..950: note = Artificial____HsIgE(1-18)_Ec(J96)-FimC(37-241) mRNA opt3
  source 1..950: mol_type = other RNA
aggagagtcccgcagtcggcgtccagcggctctgcttgttcgtgtgtgtgtcgttgcaggccttattcaagcttaccatggactggacctggatcctgtttctggtggccgctgccacaagagtgcatagcggagttgctctgggagccaccagagtgatctatcctgccggccagaagcaggttcagctggccgtgaccaacaacgacgagaacagcacctacctgatccagagctgggtcgagaatgccgacggcgtgaaggacggcagattcatcgttacccctccactgttcgccatgaagggcaagaaagagaacaccctgcggatcctggacgccaccaacaatcagctgccccaggacagagaaagcctgttctggatgaacgtgaaggctatccccagcatggacaagagcaagctgaccgagaataccctgcagctggccatcatcagccggatcaagctgtactacagacccgccaaactggccctgcctccagatcaggctgccgagaaactgcggttcagaagaagcgccaacagcctgacactgatcaaccccacaccttactacctgaccgtgaccgagctgaacgccggaaccagagtgctggaaaatgccctggttcctcctatgggcgagagcaccgtgaagctgccatctgatgccggcagcaacatcacctaccggaccatcaacgactacggcgccctgacacctaagatgaccggcgtgatggaatgatgatgaggactagtccctgttcccagagcccacttttttttctttttttgaaataaaatagcctgtctttcagatctcaaaggctcttttcagagccaccaaaaaaaaaaaaaaaaaaaaaaaaaaaaaaaaaaaaaaaaaaaaaaaaaaaaaaaaaaaaaaaaaaaaaaaaaaaaaaaaaaaaaaaaaaaaaaaaaaaaa

SEQ ID NO: 898 - RNA, 1181 nt, synthetic construct
  misc_feature 1..1181: note Artificial____Ec(J96)-FimH(1-21)_Ec(J96)-FimH(22-300) mRNA opt3
  source 1..1181: mol_type = other RNA
aggagagtcccgcagtcggcgtccagcggctctgcttgttcgtgtgtgtgtcgttgcaggccttattcaagcttaccatgaagcgcgtgatcaccctgtttgccgtgctgcttatgggctggagcgtgaacgcctggtcctttgcctgcaagaccgccaacggaaccgccattcctatcggcggaggatccgccaatgtgtatgtgaatctggcccctgtggtcaacgtgggccagaacctggtggtggatctgagcacccagatcttttgccacaacgactaccccgagacaatcaccgactacgtgaccctgcagagaggctctgcttacggcggcgtgctgagcaatttttccggcaccgtgaagtacagcggcagcagctacccatttcctaccaccagcgagacacccagagtggtgtacaacagcagaaccgacaagccctggcctgtggctctgtacctgacacctgttagctctgctggcggcgtggccattaaggccggatctctgatcgccgtgctgatcctgagacagaccaacaactacaacagcgacgacttccagttcgtgtggaacatctacgccaacaacgacgtggtggtgcctacaggcggctgtgatgtgtctgccagagatgtgaccgtgacactgcctgactaccctggcagcgtgccaattcctctgaccgtgtactgtgccaagagccagaatctgggctactacctgagcggcacaacagccgatgccggcaacagcatcttcaccaacaccgccagcttcagccctgctcaaggtgttggagtgcagctgacccggaacggcacaatcatccccgccaacaataccgtgtctctgggcgctgttggcaccagcgctgtttctctgggactgaccgccaattacgccagaacaggcggacaagtgaccgccggcaatgtgcagtctatcatcggcgtgaccttcgtgtaccagtgatgatgaggactagtccctgttcccagagcccacttttttttctttttttgaaataaaatagcctgtctttcagatctcaaaggctcttttcagagccaccaaaaaaaaaaaaaaaaaaaaaaaaaaaaaaaaaaaaaaaaaaaaaaaaaaaaaaaaaaaaaaaaaaaaaaaaaaaaaaaaaaaaaaaaaaaaaaaaaaaaa

SEQ ID NO: 899 - RNA, 1172 nt, synthetic construct
  misc_feature 1..1172: note = Artificial____HsIgE(1-18)_Ec(J96)-FimH(22-300) mRNA opt3
  source 1..1172: mol_type = other RNA
aggagagtcccgcagtcggcgtccagcggctctgcttgttcgtgtgtgtgtcgttgcaggccttattcaagcttaccatggactggacctggatcctgtttctggtggccgctgccacaagagtgcacagctttgcctgcaagaccgccaacggcaccgccattcctattggcggaggatccgccaatgtgtatgtgaatctggcccctgtggtcaacgtgggccagaacctggtggtggatctgagcacccagatcttttgccacaacgactaccccgagacaatcaccgactacgtgaccctgcagagaggctctgcttacggcggcgtgctgagcaatttttccggcaccgtgaagtacagcggcagcagctacccatttcctaccaccagcgagacacccagagtggtgtacaacagcagaaccgacaagccctggcctgtggctctgtacctgacacctgttagctctgctggcggcgtggccattaaggccggatctctgattgccgtgctgatcctgcggcagaccaacaactacaacagcgacgacttccagttcgtgtggaacatctacgccaacaacgacgtggtggtgcctacaggcggctgtgatgtgtctgccagagatgtgaccgtgacactgcctgactaccctggcagcgtgccaattcctctgaccgtgtactgtgccaagagccagaatctgggctactacctgagcggcacaacagccgatgccggcaacagcatcttcaccaacaccgccagcttcagccctgctcaaggtgttggagtgcagctgacccggaacggcacaatcatccccgccaacaataccgtgtctctgggcgctgttggcaccagcgctgtttctctgggactgaccgccaattacgccagaacaggcggacaagtgaccgccggcaatgtgcagtctatcatcggcgtgaccttcgtgtaccagtgatgatgaggactagtccctgttcccagagcccacttttttttctttttttgaaataaaatagcctgtctttcagatctcaaaggctcttttcagagccaccaaaaaaaaaaaaaaaaaaaaaaaaaaaaaaaaaaaaaaaaaaaaaaaaaaaaaaaaaaaaaaaaaaaaaaaaaaaaaaaaaaaaaaaaaaaaaaaaaaaaa

SEQ ID NO: 900 - RNA, 1178 nt, synthetic construct
  misc_feature 1..1178: note = Artificial____MmIgK(1-20)_Ec(J96)-FimH(22-300) mRNA opt3
  source 1..1178: mol_type = other RNA
aggagagtcccgcagtcggcgtccagcggctctgcttgttcgtgtgtgtgtcgttgcaggccttattcaagcttaccatggaaaccgacacactgctgctgtgggtgctgcttctttgggtgcccggctctacaggctttgcctgcaagacagccaacggcaccgccattcctatcggcggaggatccgccaatgtgtatgtgaatctggcccctgtggtcaacgtgggccagaacctggtggtggatctgagcacccagatcttttgccacaacgactaccccgagacaatcaccgactacgtgaccctgcagagaggctctgcttacggcggcgtgctgagcaatttttccggcaccgtgaagtacagcggcagcagctacccatttcctaccaccagcgagacacccagagtggtgtacaacagcagaaccgacaagccctggcctgtggctctgtacctgacacctgttagctctgctggcggcgtggccattaaggccggatctctgattgccgtgctgatcctgcggcagaccaacaactacaacagcgacgacttccagttcgtgtggaacatctacgccaacaacgacgtggtggtgcctacaggcggctgtgatgtgtctgccagagatgtgaccgtgacactgcctgactaccctggcagcgtgccaattcctctgaccgtgtactgtgccaagagccagaatctgggctactacctgagcggcacaacagccgatgccggcaacagcatcttcaccaacaccgccagcttcagccctgctcaaggtgttggagtgcagctgacccggaacggcacaatcatccccgccaacaataccgtgtctctgggcgctgttggcaccagcgctgtttctctgggactgaccgccaactacgccagaacaggcggacaagtgacagccggcaatgtgcagtctatcatcggcgtgaccttcgtgtaccagtgatgatgaggactagtccctgttcccagagcccacttttttttctttttttgaaataaaatagcctgtctttcagatctcaaaggctcttttcagagccaccaaaaaaaaaaaaaaaaaaaaaaaaaaaaaaaaaaaaaaaaaaaaaaaaaaaaaaaaaaaaaaaaaaaaaaaaaaaaaaaaaaaaaaaaaaaaaaaaaaaaa

SEQ ID NO: 901 - RNA, 1238 nt, synthetic construct
  misc_feature 1..1238: note Artificial____Ec(J96)-FimH(1-21)_Ec(J96)-FimH(22-300)_Linke r-PGDGN_Ec(J96)-FimG(24-37) mRNA opt3
  source 1..1238: mol_type = other RNA
aggagagtcccgcagtcggcgtccagcggctctgcttgttcgtgtgtgtgtcgttgcaggccttattcaagcttaccatgaagcgcgtgatcaccctgtttgccgtgctgcttatgggctggagcgtgaacgcctggtcctttgcctgcaagaccgccaacggaaccgccattcctatcggcggaggatccgccaatgtgtatgtgaatctggcccctgtggtcaacgtgggccagaacctggtggtggatctgagcacccagatcttttgccacaacgactaccccgagacaatcaccgactacgtgaccctgcagagaggctctgcttacggcggcgtgctgagcaatttttccggcaccgtgaagtacagcggcagcagctacccatttcctaccaccagcgagacacccagagtggtgtacaacagcagaaccgacaagccctggcctgtggctctgtacctgacacctgttagctctgctggcggcgtggccattaaggccggatctctgatcgccgtgctgatcctgagacagaccaacaactacaacagcgacgacttccagttcgtgtggaacatctacgccaacaacgacgtggtggtgcctacaggcggctgtgatgtgtctgccagagatgtgaccgtgacactgcctgactaccctggcagcgtgccaattcctctgaccgtgtactgtgccaagagccagaatctgggctactacctgagcggcacaacagccgatgccggcaacagcatcttcaccaacaccgccagcttcagccctgctcaaggtgttggagtgcagctgacccggaacggcacaatcatccccgccaacaataccgtgtctctgggcgctgttggcaccagcgctgtttctctgggactgaccgccaattacgccagaacaggcggacaagtgaccgccggcaatgtgcagtctatcatcggcgtgaccttcgtgtaccagcctggcgacggaaatgccgacgtgaccatcaccgtgaacggaaaggtggtggccaagtgatgatgaggactagtccctgttcccagagcccacttttttttctttttttgaaataaaatagcctgtctttcagatctcaaaggctcttttcagagccaccaaaaaaaaaaaaaaaaaaaaaaaaaaaaaaaaaaaaaaaaaaaaaaaaaaaaaaaaaaaaaaaaaaaaaaaaaaaaaaaaaaaaaaaaaaaaaaaaaaaaa

SEQ ID NO: 902 - RNA, 1229 nt, synthetic construct
  misc_feature 1..1229: note Artificial____HsIgE(1-18)_Ec(J96)-FimH(22-300)_Linker-PGDGN _Ec(J96)-FimG(24-37) mRNA opt3
  source 1..1229: mol_type = other RNA
aggagagtcccgcagtcggcgtccagcggctctgcttgttcgtgtgtgtgtcgttgcaggccttattcaagcttaccatggactggacctggatcctgtttctggtggccgctgccacaagagtgcacagctttgcctgcaagaccgccaacggcaccgccattcctattggcggaggatccgccaatgtgtatgtgaatctggcccctgtggtcaacgtgggccagaacctggtggtggatctgagcacccagatcttttgccacaacgactaccccgagacaatcaccgactacgtgaccctgcagagaggctctgcttacggcggcgtgctgagcaatttttccggcaccgtgaagtacagcggcagcagctacccatttcctaccaccagcgagacacccagagtggtgtacaacagcagaaccgacaagccctggcctgtggctctgtacctgacacctgttagctctgctggcggcgtggccattaaggccggatctctgattgccgtgctgatcctgcggcagaccaacaactacaacagcgacgacttccagttcgtgtggaacatctacgccaacaacgacgtggtggtgcctacaggcggctgtgatgtgtctgccagagatgtgaccgtgacactgcctgactaccctggcagcgtgccaattcctctgaccgtgtactgtgccaagagccagaatctgggctactacctgagcggcacaacagccgatgccggcaacagcatcttcaccaacaccgccagcttcagccctgctcaaggtgttggagtgcagctgacccggaacggcacaatcatccccgccaacaataccgtgtctctgggcgctgttggcaccagcgctgtttctctgggactgaccgccaattacgccagaacaggcggacaagtgaccgccggcaatgtgcagtctatcatcggcgtgaccttcgtgtaccagcctggcgacggaaatgccgacgtgaccatcaccgtgaacggaaaggtggtggccaagtgatgatgaggactagtccctgttcccagagcccacttttttttctttttttgaaataaaatagcctgtctttcagatctcaaaggctcttttcagagccaccaaaaaaaaaaaaaaaaaaaaaaaaaaaaaaaaaaaaaaaaaaaaaaaaaaaaaaaaaaaaaaaaaaaaaaaaaaaaaaaaaaaaaaaaaaaaaaaaaaaaa

SEQ ID NO: 903 - RNA, 1235 nt, synthetic construct
  misc_feature 1..1235: note Artificial____HsIgE(1-18)_Ec(J96)-FimH(22-300)_Linker-G4SGG _Ec(J96)-FimG(24-37) mRNA opt3
  source 1..1235: mol_type = other RNA
aggagagtcccgcagtcggcgtccagcggctctgcttgttcgtgtgtgtgtcgttgcaggccttattcaagcttaccatggactggacctggatcctgtttctggtggccgctgccacaagagtgcacagctttgcctgcaagaccgccaacggcaccgccattcctattggcggaggatccgccaatgtgtatgtgaatctggcccctgtggtcaacgtgggccagaacctggtggtggatctgagcacccagatcttttgccacaacgactaccccgagacaatcaccgactacgtgaccctgcagagaggctctgcttacggcggcgtgctgagcaatttttccggcaccgtgaagtacagcggcagcagctacccatttcctaccaccagcgagacacccagagtggtgtacaacagcagaaccgacaagccctggcctgtggctctgtacctgacacctgttagctctgctggcggcgtggccattaaggccggatctctgattgccgtgctgatcctgcggcagaccaacaactacaacagcgacgacttccagttcgtgtggaacatctacgccaacaacgacgtggtggtgcctacaggcggctgtgatgtgtctgccagagatgtgaccgtgacactgcctgactaccctggcagcgtgccaattcctctgaccgtgtactgtgccaagagccagaatctgggctactacctgagcggcacaacagccgatgccggcaacagcatcttcaccaacaccgccagcttcagccctgctcaaggtgttggagtgcagctgacccggaacggcacaatcatccccgccaacaataccgtgtctctgggcgctgttggcaccagcgctgtttctctgggactgaccgccaattacgccagaacaggcggacaagtgaccgccggcaatgtgcagtctatcatcggcgtgaccttcgtgtaccaaggcggaggcggatctggcggagccgatgtgacaatcacagtgaacggaaaggtggtggccaagtgatgatgaggactagtccctgttcccagagcccacttttttttctttttttgaaataaaatagcctgtctttcagatctcaaaggctcttttcagagccaccaaaaaaaaaaaaaaaaaaaaaaaaaaaaaaaaaaaaaaaaaaaaaaaaaaaaaaaaaaaaaaaaaaaaaaaaaaaaaaaaaaaaaaaaaaaaaaaaaaaaa

SEQ ID NO: 904 - RNA, 1235 nt, synthetic construct
  misc_feature 1..1235: note Artificial____MmIgK(1-20)_Ec(J96)-FimH(22-300)_Linker-PGDGN _Ec(J96)-FimG(24-37) mRNA opt3
  source 1..1235: mol_type = other RNA
aggagagtcccgcagtcggcgtccagcggctctgcttgttcgtgtgtgtgtcgttgcaggccttattcaagcttaccatggaaaccgacacactgctgctgtgggtgctgcttctttgggtgcccggctctacaggctttgcctgcaagacagccaacggcaccgccattcctatcggcggaggatccgccaatgtgtatgtgaatctggcccctgtggtcaacgtgggccagaacctggtggtggatctgagcacccagatcttttgccacaacgactaccccgagacaatcaccgactacgtgaccctgcagagaggctctgcttacggcggcgtgctgagcaatttttccggcaccgtgaagtacagcggcagcagctacccatttcctaccaccagcgagacacccagagtggtgtacaacagcagaaccgacaagccctggcctgtggctctgtacctgacacctgttagctctgctggcggcgtggccattaaggccggatctctgattgccgtgctgatcctgcggcagaccaacaactacaacagcgacgacttccagttcgtgtggaacatctacgccaacaacgacgtggtggtgcctacaggcggctgtgatgtgtctgccagagatgtgaccgtgacactgcctgactaccctggcagcgtgccaattcctctgaccgtgtactgtgccaagagccagaatctgggctactacctgagcggcacaacagccgatgccggcaacagcatcttcaccaacaccgccagcttcagccctgctcaaggtgttggagtgcagctgacccggaacggcacaatcatccccgccaacaataccgtgtctctgggcgctgttggcaccagcgctgtttctctgggactgaccgccaactacgccagaacaggcggacaagtgacagccggcaatgtgcagtctatcatcggcgtgaccttcgtgtaccagcctggcgacggaaatgccgacgtgaccatcaccgtgaacggaaaggtggtggccaagtgatgatgaggactagtccctgttcccagagcccacttttttttctttttttgaaataaaatagcctgtctttcagatctcaaaggctcttttcagagccaccaaaaaaaaaaaaaaaaaaaaaaaaaaaaaaaaaaaaaaaaaaaaaaaaaaaaaaaaaaaaaaaaaaaaaaaaaaaaaaaaaaaaaaaaaaaaaaaaaaaaa

SEQ ID NO: 905 - RNA, 1235 nt, synthetic construct
  misc_feature 1..1235: note Artificial____MmIgK(1-20)_Ec(536)-FimH(22-300)_Linker-PGDGN _Ec(J96)-FimG(24-37) mRNA opt3
  source 1..1235: mol_type = other RNA
aggagagtcccgcagtcggcgtccagcggctctgcttgttcgtgtgtgtgtcgttgcaggccttattcaagcttaccatggaaaccgacacactgctgctgtgggtgctgcttctttgggtgcccggctctacaggctttgcctgcaagacagccaacggcaccgccattcctatcggcggaggatccgccaatgtgtatgtgaatctggcccctgccgtgaacgtgggccagaatctggtggtggatctgagcacccagatcttttgccacaacgactaccccgagacaatcaccgactacgtgaccctgcagagaggctctgcttacggcggagtgctgagcagctttagcggcaccgtgaagtacaacggcagcagctacccatttcctaccaccagcgagacacccagagtggtgtacaacagcagaaccgacaagccctggcctgtggctctgtacctgacacctgttagctctgctggcggcgtggccattaaggccggatctctgattgccgtgctgatcctgcggcagaccaacaactacaacagcgacgacttccagttcgtgtggaacatctacgccaacaacgacgtggtggtgcctacaggcggctgtgatgtgtctgccagagatgtgaccgtgacactgcctgactaccctggcagcgtgccaattcctctgaccgtgtactgtgccaagagccagaacctgggctactacctgtctggcacaacagccgatgccggcaacagcatcttcaccaacacagccagcttcagccccgctcaaggtgttggagtgcagctgaccagaaacggcacaatcatccccgccaacaataccgtgtctctgggcgctgttggcaccagcgctgtttctctgggactgaccgccaactacgccagaacaggcggacaagtgacagccggcaatgtgcagtctatcatcggcgtgaccttcgtgtaccagcctggcgacggaaatgccgacgtgaccatcaccgtgaacggaaaggtggtggccaagtgatgatgaggactagtccctgttcccagagcccacttttttttctttttttgaaataaaatagcctgtctttcagatctcaaaggctcttttcagagccaccaaaaaaaaaaaaaaaaaaaaaaaaaaaaaaaaaaaaaaaaaaaaaaaaaaaaaaaaaaaaaaaaaaaaaaaaaaaaaaaaaaaaaaaaaaaaaaaaaaaaa

SEQ ID NO: 906 - RNA, 1259 nt, synthetic construct
  misc_feature 1..1259: note Artificial____HsIgE(1-18)_Ec(J96)-FimH(22-300)_Linker-(G4S) 3_Ec(J96)-FimC(135-148) mRNA opt3
  source 1..1259: mol_type = other RNA
aggagagtcccgcagtcggcgtccagcggctctgcttgttcgtgtgtgtgtcgttgcaggccttattcaagcttaccatggactggacctggatcctgtttctggtggccgctgccacaagagtgcacagctttgcctgcaagaccgccaacggcaccgccattcctattggcggaggatccgccaatgtgtatgtgaatctggcccctgtggtcaacgtgggccagaacctggtggtggatctgagcacccagatcttttgccacaacgactaccccgagacaatcaccgactacgtgaccctgcagagaggctctgcttacggcggcgtgctgagcaatttttccggcaccgtgaagtacagcggcagcagctacccatttcctaccaccagcgagacacccagagtggtgtacaacagcagaaccgacaagccctggcctgtggctctgtacctgacacctgttagctctgctggcggcgtggccattaaggccggatctctgattgccgtgctgatcctgcggcagaccaacaactacaacagcgacgacttccagttcgtgtggaacatctacgccaacaacgacgtggtggtgcctacaggcggctgtgatgtgtctgccagagatgtgaccgtgacactgcctgactaccctggcagcgtgccaattcctctgaccgtgtactgtgccaagagccagaatctgggctactacctgagcggcacaacagccgatgccggcaacagcatcttcaccaacaccgccagcttcagccctgctcaaggtgttggagtgcagctgacccggaacggcacaatcatccccgccaacaataccgtgtctctgggcgctgttggcaccagcgctgtttctctgggactgaccgccaattacgccagaacaggcggacaagtgaccgccggcaatgtgcagtctatcatcggcgtgaccttcgtgtaccaaggcggaggcggatctggtggcggaggcagtggtggcggtggatctacagagaatactctgcagctggccatcatcagccggatcaagtgatgatgaggactagtccctgttcccagagcccacttttttttctttttttgaaataaaatagcctgtctttcagatctcaaaggctcttttcagagccaccaaaaaaaaaaaaaaaaaaaaaaaaaaaaaaaaaaaaaaaaaaaaaaaaaaaaaaaaaaaaaaaaaaaaaaaaaaaaaaaaaaaaaaaaaaaaaaaaaaaaa

SEQ ID NO: 907 - RNA, 1682 nt, synthetic construct
  misc_feature 1..1682: note Artificial____LumSynth(1-154_C37A_N102D)_Linker(GGS)4-GGG_E c(J96)-FimH(22-300)_Linker-PGDGN_Ec(J96)-FimG(24-37) mRNA opt3
  source 1..1682: mol_type = other RNA
aggagagtcccgcagtcggcgtccagcggctctgcttgttcgtgtgtgtgtcgttgcaggccttattcaagcttaccatgcagatctacgagggcaagctgaccgccgagggcctgagatttggaatcgtggccagccggttcaatcacgccctggtggatagactggtggaaggcgccatcgatgccattgtcagacacggcggcagagaagaggacatcaccctcgttagagtgcccggctcttgggagattcctgtggctgctggcgagctggcccggaaagaagatatcgacgccgttatcgccatcggcgtgctgatcagaggcgccacacctcacttcgactatatcgccagcgaggtgtccaaaggcctggccgatctgagcctggaactgagaaagcccatcaccttcggcgtgatcaccgctgacacactggaacaggccattgagagagccggcaccaagcacggcaacaaaggatgggaagccgctctgtccgccatcgagatggccaacctgttcaagagcctgagaggcggctctggtggttctggcggatcaggtggaagtggcggaggatttgcctgcaagaccgccaacggaaccgccattcctatcggaggcggaagcgccaatgtgtatgtgaatctggcccctgtggtcaacgtgggccagaacctggtggtggatctgagcacccagatcttttgccacaacgactaccccgagacaatcaccgactacgtgaccctgcagagaggctctgcttacggcggagtgctgagcaatttcagcggcaccgtgaagtacagcggcagcagctacccatttcctaccaccagcgagacacccagagtggtgtacaacagcagaaccgacaagccctggcctgtggctctgtacctgacacctgttagctctgctggcggcgtggcaatcaaagccggatctctgatcgctgtgctgatcctgcggcagaccaacaactacaacagcgacgacttccagttcgtgtggaacatctacgccaacaacgacgtggtggtgcctacaggcggctgtgatgtgtctgccagagatgtgaccgtgacactgcctgactaccctggcagcgtgccaattcctctgaccgtgtactgtgccaagagccagaatctgggctactacctgagcggcacaacagccgatgccggcaacagcatcttcaccaacaccgccagcttcagccctgctcaaggtgttggagtgcagctgacccggaacggcacaatcatccccgccaacaataccgtgtctctgggcgctgttggcaccagcgctgtttctctgggactgaccgccaattacgccagaacaggcggacaagtgacagccggcaatgtgcagagcatcatcggagtgaccttcgtgtaccagcctggcgacggaaatgccgacgtgaccatcaccgtgaacggaaaggtggtggccaagtgatgatgaggactagtccctgttcccagagcccacttttttttctttttttgaaataaaatagcctgtctttcagatctcaaaggctcttttcagagccaccaaaaaaaaaaaaaaaaaaaaaaaaaaaaaaaaaaaaaaaaaaaaaaaaaaaaaaaaaaaaaaaaaaaaaaaaaaaaaaaaaaaaaaaaaaaaaaaaaaaaa

SEQ ID NO: 908 - RNA, 1700 nt, synthetic construct
  misc_feature 1..1700: note Artificial____HsIgE(1-18)_Ec(J96)-FimH(22-300)_Linker-PGDGN _Ec(J96)-FimG(24-37)_Linker-SGG_LumSynth(1-154_C37A_N102D) mRNA opt3
  source 1..1700: mol_type = other RNA
aggagagtcccgcagtcggcgtccagcggctctgcttgttcgtgtgtgtgtcgttgcaggccttattcaagcttaccatggactggacctggatcctgtttctggtggccgctgccacaagagtgcacagctttgcctgcaagaccgccaacggcaccgccattcctattggcggaggatccgccaatgtgtatgtgaatctggcccctgtggtcaacgtgggccagaacctggtggtggatctgagcacccagatcttttgccacaacgactaccccgagacaatcaccgactacgtgaccctgcagagaggctctgcttacggcggcgtgctgagcaatttttccggcaccgtgaagtacagcggcagcagctacccatttcctaccaccagcgagacacccagagtggtgtacaacagcagaaccgacaagccctggcctgtggctctgtacctgacacctgttagctctgctggcggcgtggccattaaggccggatctctgattgccgtgctgatcctgcggcagaccaacaactacaacagcgacgacttccagttcgtgtggaacatctacgccaacaacgacgtggtggtgcctacaggcggctgtgatgtgtctgccagagatgtgaccgtgacactgcctgactaccctggcagcgtgccaattcctctgaccgtgtactgtgccaagagccagaatctgggctactacctgagcggcacaacagccgatgccggcaacagcatcttcaccaacaccgccagcttcagccctgctcaaggtgttggagtgcagctgacccggaacggcacaatcatccccgccaacaataccgtgtctctgggcgctgttggcaccagcgctgtttctctgggactgaccgccaattacgccagaacaggcggacaagtgaccgccggcaatgtgcagtctatcatcggcgtgaccttcgtgtaccagcctggcgacggaaatgccgacgtgaccatcaccgtgaacggaaaggtggtggccaagtctggcggcatgcagatctatgagggcaagctgacagccgagggcctgagatttggaatcgtggccagccggttcaatcacgccctggtggatagactggtggaaggcgccatcgatgccattgtcagacacggcggcagagaagaggacatcaccctcgttagagtgcccggctcttgggagattcctgtggctgctggcgaactggcccggaaagaggatatcgacgccgttatcgccatcggagtgctgatcagaggcgccacacctcacttcgactatatcgccagcgaggtgtccaaaggcctggccgatctgagcctggaactgagaaagcccatcaccttcggcgtgatcaccgctgacacactggaacaggccattgagagagccggcaccaagcacggaaacaaaggatgggaagccgctctgtccgccatcgagatggccaacctgttcaagagcctgcggtgatgatgaggactagtccctgttcccagagcccacttttttttctttttttgaaataaaatagcctgtctttcagatctcaaaggctcttttcagagccaccaaaaaaaaaaaaaaaaaaaaaaaaaaaaaaaaaaaaaaaaaaaaaaaaaaaaaaaaaaaaaaaaaaaaaaaaaaaaaaaaaaaaaaaaaaaaaaaaaaaaa

SEQ ID NO: 909 - RNA, 1727 nt, synthetic construct
  misc_feature 1..1727: note Artificial____HsIgE(1-18)_Ec(J96)-FimH(22-300)_Linker-PGDGN _Ec(J96)-FimG(24-37)_Linker-SGG_Ferritin(5-167_N19Q) mRNA opt3
  source 1..1727: mol_type = other RNA
aggagagtcccgcagtcggcgtccagcggctctgcttgttcgtgtgtgtgtcgttgcaggccttattcaagcttaccatggactggacctggatcctgtttctggtggccgctgccacaagagtgcacagctttgcctgcaagaccgccaacggcaccgccattcctattggcggaggatccgccaatgtgtatgtgaatctggcccctgtggtcaacgtgggccagaacctggtggtggatctgagcacccagatcttttgccacaacgactaccccgagacaatcaccgactacgtgaccctgcagagaggctctgcttacggcggcgtgctgagcaatttttccggcaccgtgaagtacagcggcagcagctacccatttcctaccaccagcgagacacccagagtggtgtacaacagcagaaccgacaagccctggcctgtggctctgtacctgacacctgttagctctgctggcggcgtggccattaaggccggatctctgattgccgtgctgatcctgcggcagaccaacaactacaacagcgacgacttccagttcgtgtggaacatctacgccaacaacgacgtggtggtgcctacaggcggctgtgatgtgtctgccagagatgtgaccgtgacactgcctgactaccctggcagcgtgccaattcctctgaccgtgtactgtgccaagagccagaatctgggctactacctgagcggcacaacagccgatgccggcaacagcatcttcaccaacaccgccagcttcagccctgctcaaggtgttggagtgcagctgacccggaacggcacaatcatccccgccaacaataccgtgtctctgggcgctgttggcaccagcgctgtttctctgggactgaccgccaattacgccagaacaggcggacaagtgaccgccggcaatgtgcagtctatcatcggcgtgaccttcgtgtaccagcctggcgacggaaatgccgacgtgaccatcaccgtgaacggaaaggtggtggccaagtctggcggcgacatcatcaagctgctgaacgagcaagtgaacaaagagatgcagagcagcaacctgtacatgagcatgagcagctggtgctacacccacagccttgatggcgccggactgttcctgtttgaccatgccgccgaggaatacgagcacgccaagaagctgatcatcttcctgaacgagaacaacgtgcccgtccagctgaccagcatttctgcccctgagcacaagttcgagggcctgacacagatcttccagaaggcctacgaacacgagcagcacatcagcgagagcatcaacaacatcgtggaccacgccattaagagcaaggatcacgccaccttcaactttctgcagtggtacgtggccgaacagcacgaggaagaggtgctgttcaaggacatcctggacaagatcgagctgatcggcaacgagaaccacggcctgtatctggccgaccagtacgtgaagggaatcgccaagtccagaaagagctgatgatgaggactagtccctgttcccagagcccacttttttttctttttttgaaataaaatagcctgtctttcagatctcaaaggctcttttcagagccaccaaaaaaaaaaaaaaaaaaaaaaaaaaaaaaaaaaaaaaaaaaaaaaaaaaaaaaaaaaaaaaaaaaaaaaaaaaaaaaaaaaaaaaaaaaaaaaaaaaaaa

SEQ ID NO: 910 - RNA, 1757 nt, synthetic construct
  misc_feature 1..1757: note Artificial____MmIgK(1-20)_Ec(J96)-FimH(22-300)_Linker-PGDGN _Ec(J96)-FimG(24-37)_Linker-(GGS)4_Ferritin(5-166) mRNA opt3
  source 1..1757: mol_type = other RNA
aggagagtcccgcagtcggcgtccagcggctctgcttgttcgtgtgtgtgtcgttgcaggccttattcaagcttaccatggaaaccgacacactgctgctgtgggtgctgcttctttgggtgcccggctctacaggctttgcctgcaagacagccaacggcaccgccattcctatcggcggaggatccgccaatgtgtatgtgaatctggcccctgtggtcaacgtgggccagaacctggtggtggatctgagcacccagatcttttgccacaacgactaccccgagacaatcaccgactacgtgaccctgcagagaggctctgcttacggcggcgtgctgagcaatttttccggcaccgtgaagtacagcggcagcagctacccatttcctaccaccagcgagacacccagagtggtgtacaacagcagaaccgacaagccctggcctgtggctctgtacctgacacctgttagctctgctggcggcgtggccattaaggccggatctctgattgccgtgctgatcctgcggcagaccaacaactacaacagcgacgacttccagttcgtgtggaacatctacgccaacaacgacgtggtggtgcctacaggcggctgtgatgtgtctgccagagatgtgaccgtgacactgcctgactaccctggcagcgtgccaattcctctgaccgtgtactgtgccaagagccagaatctgggctactacctgagcggcacaacagccgatgccggcaacagcatcttcaccaacaccgccagcttcagccctgctcaaggtgttggagtgcagctgacccggaacggcacaatcatccccgccaacaataccgtgtctctgggcgctgttggcaccagcgctgtttctctgggactgaccgccaactacgccagaacaggcggacaagtgacagccggcaatgtgcagtctatcatcggcgtgaccttcgtgtaccagcctggcgacggaaatgccgacgtgaccatcaccgtgaacggaaaggtggtggccaaaggcggttctggtggttctggcggaagtggcggcagcgacatcatcaagctgctgaacgagcaagtgaacaaagagatgaacagcagcaacctgtacatgagcatgagcagctggtgctacacacacagcctggatggcgccggactgttcctgtttgatcatgccgccgaggaatacgagcacgccaagaagctgatcatcttcctgaacgagaacaacgtgcccgtccagctgaccagcatttctgcccctgagcacaagttcgagggcctgacacagatcttccagaaggcctacgaacacgagcagcacatcagcgagagcatcaacaacatcgtggaccacgccatcaagagcaaggatcacgccaccttcaactttctgcagtggtacgtggccgaacagcacgaggaagaggtgctgttcaaggacatcctggacaagatcgagctgatcggcaacgagaaccacggcctgtatctggccgaccagtacgtgaagggaatcgccaagtccagaaagtgatgatgaggactagtccctgttcccagagcccacttttttttctttttttgaaataaaatagcctgtctttcagatctcaaaggctcttttcagagccaccaaaaaaaaaaaaaaaaaaaaaaaaaaaaaaaaaaaaaaaaaaaaaaaaaaaaaaaaaaaaaaaaaaaaaaaaaaaaaaaaaaaaaaaaaaaaaaaaaaaaa

SEQ ID NO: 911 - RNA, 1400 nt, synthetic construct
  misc_feature 1..1400: note Artificial____HsIgE(1-18)_Ec(J96)-FimH(22-300)_Linker-PGDGN _Ec(J96)-FimG(24-37)_TMdomain-HA(510-566) mRNA opt3
  source 1..1400: mol_type = other RNA
aggagagtcccgcagtcggcgtccagcggctctgcttgttcgtgtgtgtgtcgttgcaggccttattcaagcttaccatggactggacctggatcctgtttctggtggccgctgccacaagagtgcacagctttgcctgcaagaccgccaacggcaccgccattcctattggcggaggatccgccaatgtgtatgtgaatctggcccctgtggtcaacgtgggccagaacctggtggtggatctgagcacccagatcttttgccacaacgactaccccgagacaatcaccgactacgtgaccctgcagagaggctctgcttacggcggcgtgctgagcaatttttccggcaccgtgaagtacagcggcagcagctacccatttcctaccaccagcgagacacccagagtggtgtacaacagcagaaccgacaagccctggcctgtggctctgtacctgacacctgttagctctgctggcggcgtggccattaaggccggatctctgattgccgtgctgatcctgcggcagaccaacaactacaacagcgacgacttccagttcgtgtggaacatctacgccaacaacgacgtggtggtgcctacaggcggctgtgatgtgtctgccagagatgtgaccgtgacactgcctgactaccctggcagcgtgccaattcctctgaccgtgtactgtgccaagagccagaatctgggctactacctgagcggcacaacagccgatgccggcaacagcatcttcaccaacaccgccagcttcagccctgctcaaggtgttggagtgcagctgacccggaacggcacaatcatccccgccaacaataccgtgtctctgggcgctgttggcaccagcgctgtttctctgggactgaccgccaattacgccagaacaggcggacaagtgaccgccggcaatgtgcagtctatcatcggcgtgaccttcgtgtaccagcctggcgacggaaatgccgacgtgaccatcaccgtgaacggaaaggtggtggccaaggccaagctgaaccgggaagagatcgatggcgtgaagctggaaagcacccggatctaccagatcctggccatctacagcacagtggcctctagcctggtgctggtggtgtccctgggagccatcagcttttggatgtgcagcaacggcagcctgcagtgccggatctgtatctgatgatgaggactagtccctgttcccagagcccacttttttttctttttttgaaataaaatagcctgtctttcagatctcaaaggctcttttcagagccaccaaaaaaaaaaaaaaaaaaaaaaaaaaaaaaaaaaaaaaaaaaaaaaaaaaaaaaaaaaaaaaaaaaaaaaaaaaaaaaaaaaaaaaaaaaaaaaaaaaaaa

SEQ ID NO: 912 - RNA, 1733 nt, synthetic construct
  misc_feature 1..1733: note Artificial____HsIgE(1-18)_LumSynth(1-154_C37A_N102D)_Linker (GGS)4-GGG_Ec(J96)-FimH(22-300)_Linker-PGDGN_Ec(J96)-FimG(2 4-37) mRNA opt3
  source 1..1733: mol_type = other RNA
aggagagtcccgcagtcggcgtccagcggctctgcttgttcgtgtgtgtgtcgttgcaggccttattcaagcttaccatggactggacctggatcctgtttctggtggccgctgccacaagagtgcacagccagatctatgagggcaagctgaccgccgagggcctgagatttggaatcgtggccagccggttcaatcacgccctggtggatagactggtggaaggcgccatcgatgccattgtcagacacggcggcagagaagaggacatcaccctcgttagagtgcccggctcttgggagattcctgtggctgctggcgagctggcccggaaagaagatatcgacgccgttatcgccatcggcgtgctgatcagaggcgccacacctcacttcgactatatcgccagcgaggtgtccaaaggcctggccgatctgagcctggaactgagaaagcccatcaccttcggcgtgatcaccgctgacacactggaacaggccattgagagagccggcaccaagcacggcaacaaaggatgggaagccgctctgtccgccatcgagatggccaacctgttcaagagcctgagaggcggctctggtggttctggcggatcaggtggaagtggcggaggatttgcctgcaagaccgccaacggaaccgccattcctatcggaggcggaagcgccaatgtgtatgtgaatctggcccctgtggtcaacgtgggccagaacctggtggtggatctgagcacccagatcttttgccacaacgactaccccgagacaatcaccgactacgtgaccctgcagagaggctctgcttacggcggagtgctgagcaatttcagcggcaccgtgaagtacagcggcagcagctacccatttcctaccaccagcgagacacccagagtggtgtacaacagcagaaccgacaagccctggcctgtggctctgtacctgacacctgttagctctgctggcggcgtggcaatcaaagccggatctctgatcgctgtgctgatcctgcggcagaccaacaactacaacagcgacgacttccagttcgtgtggaacatctacgccaacaacgacgtggtggtgcctacaggcggctgtgatgtgtctgccagagatgtgaccgtgacactgcctgactaccctggcagcgtgccaattcctctgaccgtgtactgtgccaagagccagaatctgggctactacctgagcggcacaacagccgatgccggcaacagcatcttcaccaacaccgccagcttcagccctgctcaaggtgttggagtgcagctgacccggaacggcacaatcatccccgccaacaataccgtgtctctgggcgctgttggcaccagcgctgtttctctgggactgaccgccaattacgccagaacaggcggacaagtgacagccggcaatgtgcagagcatcatcggagtgaccttcgtgtaccagcctggcgacggaaatgccgacgtgaccatcaccgtgaacggaaaggtggtggccaagtgatgatgaggactagtccctgttcccagagcccacttttttttctttttttgaaataaaatagcctgtctttcagatctcaaaggctcttttcagagccaccaaaaaaaaaaaaaaaaaaaaaaaaaaaaaaaaaaaaaaaaaaaaaaaaaaaaaaaaaaaaaaaaaaaaaaaaaaaaaaaaaaaaaaaaaaaaaaaaaaaaa

SEQ ID NO: 913 - RNA, 1700 nt, synthetic construct
  misc_feature 1..1700: note Artificial____HsIgE(1-18)_Ec(J96)-FimH(22-300_N28S_N91S_N24 9Q)_Linker-PGDGN_Ec(J96)-FimG(24-37)_Linker-SGG_LumSynth(1- 154_C37A_N102D) mRNA opt3
  source 1..1700: mol_type = other RNA
aggagagtcccgcagtcggcgtccagcggctctgcttgttcgtgtgtgtgtcgttgcaggccttattcaagcttaccatggactggacctggatcctgtttctggtggccgctgccacaagagtgcacagctttgcctgtaaaaccgccagcggcaccgccattcctatcggcggaggatctgccaatgtgtatgtgaatctggcccctgtggtcaacgtgggccagaacctggtggtggatctgagcacccagatcttttgccacaacgactaccccgagacaatcaccgactacgtgaccctgcagagaggctctgcttacggcggagtgctgagcagcttttccggcaccgtgaagtacagcggcagcagctacccatttcctaccaccagcgagacacccagagtggtgtacaacagcagaaccgacaagccctggcctgtggctctgtacctgacacctgttagctctgctggcggcgtggccattaaggccggatctctgattgccgtgctgatcctgcggcagaccaacaactacaacagcgacgacttccagttcgtgtggaacatctacgccaacaacgacgtggtggtgcctacaggcggctgtgatgtgtctgccagagatgtgaccgtgacactgcctgactaccctggcagcgtgccaattcctctgaccgtgtactgtgccaagagccagaatctgggctactacctgagcggcacaacagccgatgccggcaacagcatcttcaccaacaccgccagcttcagccctgctcaaggtgttggagtgcagctgaccagacagggcacaatcatccccgccaacaataccgtgtctctgggcgctgttggcaccagcgctgtttctctgggactgaccgccaactacgccagaacaggcggacaagtgacagccggcaatgtgcagtctatcatcggcgtgaccttcgtgtaccagcctggcgacggaaatgccgacgtgaccatcaccgtgaacggaaaggtggtggccaagtctggcggcatgcagatctatgagggcaagctgaccgccgagggcctgagatttggaatcgtggccagccggttcaatcacgccctggtggatagactggtggaaggcgccatcgatgccattgtcagacacggcggcagagaagaggacatcaccctcgttagagtgcccggctcttgggagattcctgtggctgctggcgaactggcccggaaagaggatatcgacgccgttatcgccatcggggtgctgatcagaggcgccacacctcacttcgactatatcgccagcgaggtgtccaaaggcctggccgatctgagcctggaactgagaaagcccatcaccttcggcgtgatcaccgctgacacactggaacaggccattgagagagccggcaccaagcacggaaacaaaggatgggaagccgctctgtccgccatcgagatggccaacctgttcaagagcctgcggtgatgatgaggactagtccctgttcccagagcccacttttttttctttttttgaaataaaatagcctgtctttcagatctcaaaggctcttttcagagccaccaaaaaaaaaaaaaaaaaaaaaaaaaaaaaaaaaaaaaaaaaaaaaaaaaaaaaaaaaaaaaaaaaaaaaaaaaaaaaaaaaaaaaaaaaaaaaaaaaaaaa

SEQ ID NO: 914 - RNA, 1700 nt, synthetic construct
  misc_feature 1..1700: note Artificial____HsIgE(1-18)_Ec(J96)-FimH(22-300_N28S_N91S_N24 9Q_N256D)_Linker-PGDGN_Ec(J96)-FimG(24-37)_Linker-SGG_LumSy nth(1-154_C37A_N102D) mRNA opt3
  source 1..1700: mol_type = other RNA
aggagagtcccgcagtcggcgtccagcggctctgcttgttcgtgtgtgtgtcgttgcaggccttattcaagcttaccatggactggacctggatcctgtttctggtggccgctgccacaagagtgcacagctttgcctgtaaaaccgccagcggcaccgccattcctatcggcggaggatctgccaatgtgtatgtgaatctggcccctgtggtcaacgtgggccagaacctggtggtggatctgagcacccagatcttttgccacaacgactaccccgagacaatcaccgactacgtgaccctgcagagaggctctgcttacggcggagtgctgagcagcttttccggcaccgtgaagtacagcggcagcagctacccatttcctaccaccagcgagacacccagagtggtgtacaacagcagaaccgacaagccctggcctgtggctctgtacctgacacctgttagctctgctggcggcgtggccattaaggccggatctctgattgccgtgctgatcctgcggcagaccaacaactacaacagcgacgacttccagttcgtgtggaacatctacgccaacaacgacgtggtggtgcctacaggcggctgtgatgtgtctgccagagatgtgaccgtgacactgcctgactaccctggcagcgtgccaattcctctgaccgtgtactgtgccaagagccagaatctgggctactacctgagcggcacaacagccgatgccggcaacagcatcttcaccaacaccgccagcttcagccctgctcaaggtgttggagtgcagctgaccagacagggcacaatcatccccgccgacaacacagtgtctctgggagctgttggcaccagcgccgtttctctgggactgacagccaactacgccagaacaggcggacaagtgacagccggcaatgtgcagtctatcatcggcgtgaccttcgtgtaccagcctggcgacggaaatgccgacgtgaccatcaccgtgaacggaaaggtggtggccaagtctggcggcatgcagatctatgagggcaagctgaccgccgagggcctgagatttggaatcgtggccagccggttcaatcacgccctggtggatagactggtggaaggcgccatcgatgccattgtcagacacggcggcagagaagaggacatcaccctcgttagagtgcccggctcttgggagattcctgtggctgctggcgaactggcccggaaagaggatatcgacgccgttatcgccatcggggtgctgatcagaggcgccacacctcacttcgactatatcgccagcgaggtgtccaaaggcctggccgatctgagcctggaactgagaaagcccatcaccttcggcgtgatcaccgctgacacactggaacaggccattgagagagccggcaccaagcacggaaacaaaggatgggaagccgctctgtccgccatcgagatggccaacctgttcaagagcctgcggtgatgatgaggactagtccctgttcccagagcccacttttttttctttttttgaaataaaatagcctgtctttcagatctcaaaggctcttttcagagccaccaaaaaaaaaaaaaaaaaaaaaaaaaaaaaaaaaaaaaaaaaaaaaaaaaaaaaaaaaaaaaaaaaaaaaaaaaaaaaaaaaaaaaaaaaaaaaaaaaaaaa

SEQ ID NO: 915 - RNA, 1700 nt, synthetic construct
  misc_feature 1..1700: note Artificial____HsIgE(1-18)_Ec(J96)-FimH(22-300_N28S_V48C_L55 C_N91S_N249Q)_Linker-PGDGN_Ec(J96)-FimG(24-37)_Linker-SGG_L umSynth(1-154_C37A_N102D) mRNA opt3
  source 1..1700: mol_type = other RNA
aggagagtcccgcagtcggcgtccagcggctctgcttgttcgtgtgtgtgtcgttgcaggccttattcaagcttaccatggactggacctggatcctgtttctggtggccgctgccacaagagtgcacagctttgcctgtaaaaccgccagcggcaccgccattcctatcggcggaggatctgccaatgtgtatgtgaatctggccccttgcgtgaacgtgggccagaactgtgtggtggacctgagcacccagatcttttgccacaacgactaccccgagacaatcaccgactacgtgaccctgcagagaggctctgcttacggcggagtgctgagcagcttttccggcaccgtgaagtacagcggcagcagctacccatttcctaccaccagcgagacacccagagtggtgtacaacagcagaaccgacaagccctggcctgtggctctgtacctgacacctgttagctctgctggcggcgtggccattaaggccggatctctgattgccgtgctgatcctgcggcagaccaacaactacaacagcgacgacttccagttcgtgtggaacatctacgccaacaacgacgtggtggtgcctacaggcggctgtgatgtgtctgccagagatgtgaccgtgacactgcctgactaccctggcagcgtgccaattcctctgaccgtgtactgtgccaagagccagaacctgggctactacctgtctggcacaacagccgatgccggcaacagcatcttcaccaacaccgccagcttcagccctgctcaaggtgttggagtgcagctgaccagacagggcacaatcatccccgccaacaataccgtgtctctgggcgctgttggcaccagcgctgtttctctgggactgaccgccaactacgccagaacaggcggacaagtgacagccggcaatgtgcagtctatcatcggcgtgaccttcgtgtaccagcctggcgacggaaatgccgacgtgaccatcaccgtgaacggaaaggtggtggccaagtctggcggcatgcagatctatgagggcaagctgaccgccgagggcctgagatttggaatcgtggccagccggttcaatcacgccctggtggatagactggtggaaggcgccatcgatgccattgtcagacacggcggcagagaagaggacatcaccctcgttagagtgcccggctcttgggagattcctgtggctgctggcgaactggcccggaaagaggatatcgacgccgttatcgccatcggggtgctgatcagaggcgccacacctcacttcgactatatcgccagcgaggtgtccaaaggcctggccgatctgagcctggaactgagaaagcccatcaccttcggcgtgatcaccgctgacacactggaacaggccattgagagagccggcaccaagcacggaaacaaaggatgggaagccgctctgtccgccatcgagatggccaacctgttcaagagcctgcggtgatgatgaggactagtccctgttcccagagcccacttttttttctttttttgaaataaaatagcctgtctttcagatctcaaaggctcttttcagagccaccaaaaaaaaaaaaaaaaaaaaaaaaaaaaaaaaaaaaaaaaaaaaaaaaaaaaaaaaaaaaaaaaaaaaaaaaaaaaaaaaaaaaaaaaaaaaaaaaaaaaa

SEQ ID NO: 916 - RNA, 1700 nt, synthetic construct
  misc_feature 1..1700: note Artificial____HsIgE(1-18)_Ec(J96)-FimH(22-300_F165V)_Linker -PGDGN_Ec(J96)-FimG(24-37)_Linker-SGG_LumSynth(1-154_C37A_N 102D) mRNA opt3
  source 1..1700: mol_type = other RNA
aggagagtcccgcagtcggcgtccagcggctctgcttgttcgtgtgtgtgtcgttgcaggccttattcaagcttaccatggactggacctggatcctgtttctggtggccgctgccacaagagtgcacagctttgcctgcaagaccgccaacggcaccgccattcctattggcggaggatccgccaatgtgtatgtgaatctggcccctgtggtcaacgtgggccagaacctggtggtggatctgagcacccagatcttttgccacaacgactaccccgagacaatcaccgactacgtgaccctgcagagaggctctgcttacggcggcgtgctgagcaatttttccggcaccgtgaagtacagcggcagcagctacccatttcctaccaccagcgagacacccagagtggtgtacaacagcagaaccgacaagccctggcctgtggctctgtacctgacacctgttagctctgctggcggcgtggccattaaggccggatctctgattgccgtgctgatcctgcggcagaccaacaactacaacagcgacgacttccaggtcgtgtggaacatctacgccaacaacgacgtggtggtgcctacaggcggctgtgatgtgtctgccagagatgtgaccgtgacactgcctgactaccctggcagcgtgccaattcctctgaccgtgtactgtgccaagagccagaatctgggctactacctgagcggcacaacagccgatgccggcaacagcatcttcaccaacaccgccagcttcagccctgctcaaggtgttggagtgcagctgacccggaacggcacaatcatccccgccaacaataccgtgtctctgggcgctgttggcaccagcgctgtttctctgggactgaccgccaattacgccagaacaggcggacaagtgaccgccggcaatgtgcagtctatcatcggcgtgaccttcgtgtaccagcctggcgacggaaatgccgacgtgaccatcaccgtgaacggaaaggtggtggccaagtctggcggcatgcagatctatgagggcaagctgacagccgagggcctgagatttggaatcgtggccagccggttcaatcacgccctggtggatagactggtggaaggcgccatcgatgccattgtcagacacggcggcagagaagaggacatcaccctcgttagagtgcccggctcttgggagattcctgtggctgctggcgaactggcccggaaagaggatatcgacgccgttatcgccatcggagtgctgatcagaggcgccacacctcacttcgactatatcgccagcgaggtgtccaaaggcctggccgatctgagcctggaactgagaaagcccatcaccttcggcgtgatcaccgctgacacactggaacaggccattgagagagccggcaccaagcacggaaacaaaggatgggaagccgctctgtccgccatcgagatggccaacctgttcaagagcctgcggtgatgatgaggactagtccctgttcccagagcccacttttttttctttttttgaaataaaatagcctgtctttcagatctcaaaggctcttttcagagccaccaaaaaaaaaaaaaaaaaaaaaaaaaaaaaaaaaaaaaaaaaaaaaaaaaaaaaaaaaaaaaaaaaaaaaaaaaaaaaaaaaaaaaaaaaaaaaaaaaaaaa

SEQ ID NO: 917 - RNA, 1727 nt, synthetic construct
  misc_feature 1..1727: note Artificial____HsIgE(1-18)_Ec(J96)-FimH(22-300_N28S_N91S_N24 9Q)_Linker-PGDGN_Ec(J96)-FimG(24-37)_Linker-SGG_Ferritin(5- 167_N19Q) mRNA opt3
  source 1..1727: mol_type = other RNA
aggagagtcccgcagtcggcgtccagcggctctgcttgttcgtgtgtgtgtcgttgcaggccttattcaagcttaccatggactggacctggatcctgtttctggtggccgctgccacaagagtgcacagctttgcctgtaaaaccgccagcggcaccgccattcctatcggcggaggatctgccaatgtgtatgtgaatctggcccctgtggtcaacgtgggccagaacctggtggtggatctgagcacccagatcttttgccacaacgactaccccgagacaatcaccgactacgtgaccctgcagagaggctctgcttacggcggagtgctgagcagcttttccggcaccgtgaagtacagcggcagcagctacccatttcctaccaccagcgagacacccagagtggtgtacaacagcagaaccgacaagccctggcctgtggctctgtacctgacacctgttagctctgctggcggcgtggccattaaggccggatctctgattgccgtgctgatcctgcggcagaccaacaactacaacagcgacgacttccagttcgtgtggaacatctacgccaacaacgacgtggtggtgcctacaggcggctgtgatgtgtctgccagagatgtgaccgtgacactgcctgactaccctggcagcgtgccaattcctctgaccgtgtactgtgccaagagccagaatctgggctactacctgagcggcacaacagccgatgccggcaacagcatcttcaccaacaccgccagcttcagccctgctcaaggtgttggagtgcagctgaccagacagggcacaatcatccccgccaacaataccgtgtctctgggcgctgttggcaccagcgctgtttctctgggactgaccgccaactacgccagaacaggcggacaagtgacagccggcaatgtgcagtctatcatcggcgtgaccttcgtgtaccagcctggcgacggaaatgccgacgtgaccatcaccgtgaacggaaaggtggtggccaagtctggcggcgacatcatcaagctgctgaacgagcaagtgaacaaagagatgcagagcagcaacctgtacatgagcatgagcagctggtgctacacccacagccttgatggcgccggactgttcctgtttgatcacgccgccgaggaatacgagcacgccaagaagctgatcatcttcctgaacgagaacaacgtgcccgtccagctgacctctatctctgcccctgagcacaagttcgagggcctgacacagatcttccagaaggcctacgaacacgagcagcacatcagcgagagcatcaacaacatcgtggaccacgccattaagagcaaggatcacgccaccttcaactttctgcagtggtacgtggccgaacagcacgaggaagaggtgctgttcaaggacatcctggacaagatcgagctgatcggcaacgagaaccacggcctgtatctggccgaccagtacgtgaagggaatcgccaagtccagaaagagctgatgatgaggactagtccctgttcccagagcccacttttttttctttttttgaaataaaatagcctgtctttcagatctcaaaggctcttttcagagccaccaaaaaaaaaaaaaaaaaaaaaaaaaaaaaaaaaaaaaaaaaaaaaaaaaaaaaaaaaaaaaaaaaaaaaaaaaaaaaaaaaaaaaaaaaaaaaaaaaaaaa

SEQ ID NO: 918 - RNA, 1727 nt, synthetic construct
  misc_feature 1..1727: note Artificial____HsIgE(1-18)_Ec(J96)-FimH(22-300_N28S_N91S_N24 9Q_N256D)_Linker-PGDGN_Ec(J96)-FimG(24-37)_Linker-SGG_Ferri tin(5-167_N19Q) mRNA opt3
  source 1..1727: mol_type = other RNA
aggagagtcccgcagtcggcgtccagcggctctgcttgttcgtgtgtgtgtcgttgcaggccttattcaagcttaccatggactggacctggatcctgtttctggtggccgctgccacaagagtgcacagctttgcctgtaaaaccgccagcggcaccgccattcctatcggcggaggatctgccaatgtgtatgtgaatctggcccctgtggtcaacgtgggccagaacctggtggtggatctgagcacccagatcttttgccacaacgactaccccgagacaatcaccgactacgtgaccctgcagagaggctctgcttacggcggagtgctgagcagcttttccggcaccgtgaagtacagcggcagcagctacccatttcctaccaccagcgagacacccagagtggtgtacaacagcagaaccgacaagccctggcctgtggctctgtacctgacacctgttagctctgctggcggcgtggccattaaggccggatctctgattgccgtgctgatcctgcggcagaccaacaactacaacagcgacgacttccagttcgtgtggaacatctacgccaacaacgacgtggtggtgcctacaggcggctgtgatgtgtctgccagagatgtgaccgtgacactgcctgactaccctggcagcgtgccaattcctctgaccgtgtactgtgccaagagccagaatctgggctactacctgagcggcacaacagccgatgccggcaacagcatcttcaccaacaccgccagcttcagccctgctcaaggtgttggagtgcagctgaccagacagggcacaatcatccccgccgacaacacagtgtctctgggagctgttggcaccagcgccgtttctctgggactgacagccaactacgccagaacaggcggacaagtgacagccggcaatgtgcagtctatcatcggcgtgaccttcgtgtaccagcctggcgacggaaatgccgacgtgaccatcaccgtgaacggaaaggtggtggccaagtctggcggcgacatcatcaagctgctgaacgagcaagtgaacaaagagatgcagagcagcaacctgtacatgagcatgagcagctggtgctacacccacagccttgatggcgccggactgttcctgtttgatcacgccgccgaggaatacgagcacgccaagaagctgatcatcttcctgaacgagaacaacgtgcccgtccagctgacctctatctctgcccctgagcacaagttcgagggcctgacacagatcttccagaaggcctacgaacacgagcagcacatcagcgagagcatcaacaacatcgtggaccacgccattaagagcaaggatcacgccaccttcaactttctgcagtggtacgtggccgaacagcacgaggaagaggtgctgttcaaggacatcctggacaagatcgagctgatcggcaacgagaaccacggcctgtatctggccgaccagtacgtgaagggaatcgccaagtccagaaagagctgatgatgaggactagtccctgttcccagagcccacttttttttctttttttgaaataaaatagcctgtctttcagatctcaaaggctcttttcagagccaccaaaaaaaaaaaaaaaaaaaaaaaaaaaaaaaaaaaaaaaaaaaaaaaaaaaaaaaaaaaaaaaaaaaaaaaaaaaaaaaaaaaaaaaaaaaaaaaaaaaaa

SEQ ID NO: 919 - RNA, 1727 nt, synthetic construct
  misc_feature 1..1727: note Artificial____HsIgE(1-18)_Ec(J96)-FimH(22-300_N28S_V48C_L55 C_N91S_N249Q)_Linker-PGDGN_Ec(J96)-FimG(24-37)_Linker-SGG_F erritin(5-167_N19Q) mRNA opt3
  source 1..1727: mol_type = other RNA
aggagagtcccgcagtcggcgtccagcggctctgcttgttcgtgtgtgtgtcgttgcaggccttattcaagcttaccatggactggacctggatcctgtttctggtggccgctgccacaagagtgcacagctttgcctgtaaaaccgccagcggcaccgccattcctatcggcggaggatctgccaatgtgtatgtgaatctggccccttgcgtgaacgtgggccagaactgtgtggtggacctgagcacccagatcttttgccacaacgactaccccgagacaatcaccgactacgtgaccctgcagagaggctctgcttacggcggagtgctgagcagcttttccggcaccgtgaagtacagcggcagcagctacccatttcctaccaccagcgagacacccagagtggtgtacaacagcagaaccgacaagccctggcctgtggctctgtacctgacacctgttagctctgctggcggcgtggccattaaggccggatctctgattgccgtgctgatcctgcggcagaccaacaactacaacagcgacgacttccagttcgtgtggaacatctacgccaacaacgacgtggtggtgcctacaggcggctgtgatgtgtctgccagagatgtgaccgtgacactgcctgactaccctggcagcgtgccaattcctctgaccgtgtactgtgccaagagccagaacctgggctactacctgtctggcacaacagccgatgccggcaacagcatcttcaccaacaccgccagcttcagccctgctcaaggtgttggagtgcagctgaccagacagggcacaatcatccccgccaacaataccgtgtctctgggcgctgttggcaccagcgctgtttctctgggactgaccgccaactacgccagaacaggcggacaagtgacagccggcaatgtgcagtctatcatcggcgtgaccttcgtgtaccagcctggcgacggaaatgccgacgtgaccatcaccgtgaacggaaaggtggtggccaagtctggcggcgacatcatcaagctgctgaacgagcaagtgaacaaagagatgcagagcagcaacctgtacatgagcatgagcagctggtgctacacccacagccttgatggcgccggactgttcctgtttgatcacgccgccgaggaatacgagcacgccaagaagctgatcatcttcctgaacgagaacaacgtgcccgtccagctgacctctatctctgcccctgagcacaagttcgagggcctgacacagatcttccagaaggcctacgaacacgagcagcacatcagcgagagcatcaacaacatcgtggaccacgccattaagagcaaggatcacgccaccttcaactttctgcagtggtacgtggccgaacagcacgaggaagaggtgctgttcaaggacatcctggacaagatcgagctgatcggcaacgagaaccacggcctgtatctggccgaccagtacgtgaagggaatcgccaagtccagaaagagctgatgatgaggactagtccctgttcccagagcccacttttttttctttttttgaaataaaatagcctgtctttcagatctcaaaggctcttttcagagccaccaaaaaaaaaaaaaaaaaaaaaaaaaaaaaaaaaaaaaaaaaaaaaaaaaaaaaaaaaaaaaaaaaaaaaaaaaaaaaaaaaaaaaaaaaaaaaaaaaaaaa

SEQ ID NO: 920 - RNA, 1727 nt, synthetic construct
  misc_feature 1..1727: note Artificial____HsIgE(1-18)_Ec(J96)-FimH(22-300_F165V)_Linker -PGDGN_Ec(J96)-FimG(24-37)_Linker-SGG_Ferritin(5-167_N19Q) mRNA opt3
  source 1..1727: mol_type = other RNA
aggagagtcccgcagtcggcgtccagcggctctgcttgttcgtgtgtgtgtcgttgcaggccttattcaagcttaccatggactggacctggatcctgtttctggtggccgctgccacaagagtgcacagctttgcctgcaagaccgccaacggcaccgccattcctattggcggaggatccgccaatgtgtatgtgaatctggcccctgtggtcaacgtgggccagaacctggtggtggatctgagcacccagatcttttgccacaacgactaccccgagacaatcaccgactacgtgaccctgcagagaggctctgcttacggcggcgtgctgagcaatttttccggcaccgtgaagtacagcggcagcagctacccatttcctaccaccagcgagacacccagagtggtgtacaacagcagaaccgacaagccctggcctgtggctctgtacctgacacctgttagctctgctggcggcgtggccattaaggccggatctctgattgccgtgctgatcctgcggcagaccaacaactacaacagcgacgacttccaggtcgtgtggaacatctacgccaacaacgacgtggtggtgcctacaggcggctgtgatgtgtctgccagagatgtgaccgtgacactgcctgactaccctggcagcgtgccaattcctctgaccgtgtactgtgccaagagccagaatctgggctactacctgagcggcacaacagccgatgccggcaacagcatcttcaccaacaccgccagcttcagccctgctcaaggtgttggagtgcagctgacccggaacggcacaatcatccccgccaacaataccgtgtctctgggcgctgttggcaccagcgctgtttctctgggactgaccgccaattacgccagaacaggcggacaagtgaccgccggcaatgtgcagtctatcatcggcgtgaccttcgtgtaccagcctggcgacggaaatgccgacgtgaccatcaccgtgaacggaaaggtggtggccaagtctggcggcgacatcatcaagctgctgaacgagcaagtgaacaaagagatgcagagcagcaacctgtacatgagcatgagcagctggtgctacacccacagccttgatggcgccggactgttcctgtttgaccatgccgccgaggaatacgagcacgccaagaagctgatcatcttcctgaacgagaacaacgtgcccgtccagctgaccagcatttctgcccctgagcacaagttcgagggcctgacacagatcttccagaaggcctacgaacacgagcagcacatcagcgagagcatcaacaacatcgtggaccacgccattaagagcaaggatcacgccaccttcaactttctgcagtggtacgtggccgaacagcacgaggaagaggtgctgttcaaggacatcctggacaagatcgagctgatcggcaacgagaaccacggcctgtatctggccgaccagtacgtgaagggaatcgccaagtccagaaagagctgatgatgaggactagtccctgttcccagagcccacttttttttctttttttgaaataaaatagcctgtctttcagatctcaaaggctcttttcagagccaccaaaaaaaaaaaaaaaaaaaaaaaaaaaaaaaaaaaaaaaaaaaaaaaaaaaaaaaaaaaaaaaaaaaaaaaaaaaaaaaaaaaaaaaaaaaaaaaaaaaaa

SEQ ID NO: 921 - RNA, 1004 nt, synthetic construct
  misc_feature 1..1004: note Artificial____Ec(J96)-FimC(1-36)_Ec(J96)-FimC(37-241) mRNA opt4
  source 1..1004: mol_type = other RNA
aggagagtcccgcagtcggcgtccagcggctctgcttgttcgtgtgtgtgtcgttgcaggccttattcaagcttaccatgagcaacaagaacgtgaacgtgagaaagagccaggagatcaccttctgcctgctggccggcatcctgatgttcatggccatgatggtggccggcagagccgaggccggcgtggccctgggcgccaccagagtgatctaccccgccggccagaagcaggtgcagctggccgtgaccaacaacgacgagaacagcacctacctgatccagagctgggtggagaacgccgacggcgtgaaggacggcagattcatcgtgaccccccccctgttcgccatgaagggcaagaaggagaacaccctgagaatcctggacgccaccaacaaccagctgccccaggacagagagagcctgttctggatgaacgtgaaggccatccccagcatggacaagagcaagctgaccgagaacaccctgcagctggccatcatcagcagaatcaagctgtactacagacccgccaagctggccctgccccccgaccaggccgccgagaagctgagattcagaagaagcgccaacagcctgaccctgatcaaccccaccccctactacctgaccgtgaccgagctgaacgccggcaccagagtgctggagaacgccctggtgccccccatgggcgagagcaccgtgaagctgcccagcgacgccggcagcaacatcacctacagaaccatcaacgactacggcgccctgacccccaagatgaccggcgtgatggagtgatgatgaggactagtccctgttcccagagcccacttttttttctttttttgaaataaaatagcctgtctttcagatctcaaaggctcttttcagagccaccaaaaaaaaaaaaaaaaaaaaaaaaaaaaaaaaaaaaaaaaaaaaaaaaaaaaaaaaaaaaaaaaaaaaaaaaaaaaaaaaaaaaaaaaaaaaaaaaaaaaa

SEQ ID NO: 922 - RNA, 950 nt, synthetic construct
  misc_feature 1..950: note = Artificial____HsIgE(1-18)_Ec(J96)-FimC(37-241) mRNA opt4
  source 1..950: mol_type = other RNA
aggagagtcccgcagtcggcgtccagcggctctgcttgttcgtgtgtgtgtcgttgcaggccttattcaagcttaccatggactggacctggatcctgttcctggtggccgccgccaccagagtgcacagcggcgtggccctgggcgccaccagagtgatctaccccgccggccagaagcaggtgcagctggccgtgaccaacaacgacgagaacagcacctacctgatccagagctgggtggagaacgccgacggcgtgaaggacggcagattcatcgtgaccccccccctgttcgccatgaagggcaagaaggagaacaccctgagaatcctggacgccaccaacaaccagctgccccaggacagagagagcctgttctggatgaacgtgaaggccatccccagcatggacaagagcaagctgaccgagaacaccctgcagctggccatcatcagcagaatcaagctgtactacagacccgccaagctggccctgccccccgaccaggccgccgagaagctgagattcagaagaagcgccaacagcctgaccctgatcaaccccaccccctactacctgaccgtgaccgagctgaacgccggcaccagagtgctggagaacgccctggtgccccccatgggcgagagcaccgtgaagctgcccagcgacgccggcagcaacatcacctacagaaccatcaacgactacggcgccctgacccccaagatgaccggcgtgatggagtgatgatgaggactagtccctgttcccagagcccacttttttttctttttttgaaataaaatagcctgtctttcagatctcaaaggctcttttcagagccaccaaaaaaaaaaaaaaaaaaaaaaaaaaaaaaaaaaaaaaaaaaaaaaaaaaaaaaaaaaaaaaaaaaaaaaaaaaaaaaaaaaaaaaaaaaaaaaaaaaaaa

SEQ ID NO: 923 - RNA, 1181 nt, synthetic construct
  misc_feature 1..1181: note Artificial____Ec(J96)-FimH(1-21)_Ec(J96)-FimH(22-300) mRNA opt4
  source 1..1181: mol_type = other RNA
aggagagtcccgcagtcggcgtccagcggctctgcttgttcgtgtgtgtgtcgttgcaggccttattcaagcttaccatgaagagagtgatcaccctgttcgccgtgctgctgatgggctggagcgtgaacgcctggagcttcgcctgcaagaccgccaacggcaccgccatccccatcggcggcggcagcgccaacgtgtacgtgaacctggcccccgtggtgaacgtgggccagaacctggtggtggacctgagcacccagatcttctgccacaacgactaccccgagaccatcaccgactacgtgaccctgcagagaggcagcgcctacggcggcgtgctgagcaacttcagcggcaccgtgaagtacagcggcagcagctaccccttccccaccaccagcgagacccccagagtggtgtacaacagcagaaccgacaagccctggcccgtggccctgtacctgacccccgtgagcagcgccggcggcgtggccatcaaggccggcagcctgatcgccgtgctgatcctgagacagaccaacaactacaacagcgacgacttccagttcgtgtggaacatctacgccaacaacgacgtggtggtgcccaccggcggctgcgacgtgagcgccagagacgtgaccgtgaccctgcccgactaccccggcagcgtgcccatccccctgaccgtgtactgcgccaagagccagaacctgggctactacctgagcggcaccaccgccgacgccggcaacagcatcttcaccaacaccgccagcttcagccccgcccagggcgtgggcgtgcagctgaccagaaacggcaccatcatccccgccaacaacaccgtgagcctgggcgccgtgggcaccagcgccgtgagcctgggcctgaccgccaactacgccagaaccggcggccaggtgaccgccggcaacgtgcagagcatcatcggcgtgaccttcgtgtaccagtgatgatgaggactagtccctgttcccagagcccacttttttttctttttttgaaataaaatagcctgtctttcagatctcaaaggctcttttcagagccaccaaaaaaaaaaaaaaaaaaaaaaaaaaaaaaaaaaaaaaaaaaaaaaaaaaaaaaaaaaaaaaaaaaaaaaaaaaaaaaaaaaaaaaaaaaaaaaaaaaaaa

SEQ ID NO: 924 - RNA, 1172 nt, synthetic construct
  misc_feature 1..1172: note = Artificial____HsIgE(1-18)_Ec(J96)-FimH(22-300) mRNA opt4
  source 1..1172: mol_type = other RNA
aggagagtcccgcagtcggcgtccagcggctctgcttgttcgtgtgtgtgtcgttgcaggccttattcaagcttaccatggactggacctggatcctgttcctggtggccgccgccaccagagtgcacagcttcgcctgcaagaccgccaacggcaccgccatccccatcggcggcggcagcgccaacgtgtacgtgaacctggcccccgtggtgaacgtgggccagaacctggtggtggacctgagcacccagatcttctgccacaacgactaccccgagaccatcaccgactacgtgaccctgcagagaggcagcgcctacggcggcgtgctgagcaacttcagcggcaccgtgaagtacagcggcagcagctaccccttccccaccaccagcgagacccccagagtggtgtacaacagcagaaccgacaagccctggcccgtggccctgtacctgacccccgtgagcagcgccggcggcgtggccatcaaggccggcagcctgatcgccgtgctgatcctgagacagaccaacaactacaacagcgacgacttccagttcgtgtggaacatctacgccaacaacgacgtggtggtgcccaccggcggctgcgacgtgagcgccagagacgtgaccgtgaccctgcccgactaccccggcagcgtgcccatccccctgaccgtgtactgcgccaagagccagaacctgggctactacctgagcggcaccaccgccgacgccggcaacagcatcttcaccaacaccgccagcttcagccccgcccagggcgtgggcgtgcagctgaccagaaacggcaccatcatccccgccaacaacaccgtgagcctgggcgccgtgggcaccagcgccgtgagcctgggcctgaccgccaactacgccagaaccggcggccaggtgaccgccggcaacgtgcagagcatcatcggcgtgaccttcgtgtaccagtgatgatgaggactagtccctgttcccagagcccacttttttttctttttttgaaataaaatagcctgtctttcagatctcaaaggctcttttcagagccaccaaaaaaaaaaaaaaaaaaaaaaaaaaaaaaaaaaaaaaaaaaaaaaaaaaaaaaaaaaaaaaaaaaaaaaaaaaaaaaaaaaaaaaaaaaaaaaaaaaaaa

SEQ ID NO: 925 - RNA, 1178 nt, synthetic construct
  misc_feature 1..1178: note = Artificial____MmIgK(1-20)_Ec(J96)-FimH(22-300) mRNA opt4
  source 1..1178: mol_type = other RNA
aggagagtcccgcagtcggcgtccagcggctctgcttgttcgtgtgtgtgtcgttgcaggccttattcaagcttaccatggagaccgacaccctgctgctgtgggtgctgctgctgtgggtgcccggcagcaccggcttcgcctgcaagaccgccaacggcaccgccatccccatcggcggcggcagcgccaacgtgtacgtgaacctggcccccgtggtgaacgtgggccagaacctggtggtggacctgagcacccagatcttctgccacaacgactaccccgagaccatcaccgactacgtgaccctgcagagaggcagcgcctacggcggcgtgctgagcaacttcagcggcaccgtgaagtacagcggcagcagctaccccttccccaccaccagcgagacccccagagtggtgtacaacagcagaaccgacaagccctggcccgtggccctgtacctgacccccgtgagcagcgccggcggcgtggccatcaaggccggcagcctgatcgccgtgctgatcctgagacagaccaacaactacaacagcgacgacttccagttcgtgtggaacatctacgccaacaacgacgtggtggtgcccaccggcggctgcgacgtgagcgccagagacgtgaccgtgaccctgcccgactaccccggcagcgtgcccatccccctgaccgtgtactgcgccaagagccagaacctgggctactacctgagcggcaccaccgccgacgccggcaacagcatcttcaccaacaccgccagcttcagccccgcccagggcgtgggcgtgcagctgaccagaaacggcaccatcatccccgccaacaacaccgtgagcctgggcgccgtgggcaccagcgccgtgagcctgggcctgaccgccaactacgccagaaccggcggccaggtgaccgccggcaacgtgcagagcatcatcggcgtgaccttcgtgtaccagtgatgatgaggactagtccctgttcccagagcccacttttttttctttttttgaaataaaatagcctgtctttcagatctcaaaggctcttttcagagccaccaaaaaaaaaaaaaaaaaaaaaaaaaaaaaaaaaaaaaaaaaaaaaaaaaaaaaaaaaaaaaaaaaaaaaaaaaaaaaaaaaaaaaaaaaaaaaaaaaaaaa

SEQ ID NO: 926 - RNA, 1238 nt, synthetic construct
  misc_feature 1..1238: note Artificial____Ec(J96)-FimH(1-21)_Ec(J96)-FimH(22-300)_Linke r-PGDGN_Ec(J96)-FimG(24-37) mRNA opt4
  source 1..1238: mol_type = other RNA
aggagagtcccgcagtcggcgtccagcggctctgcttgttcgtgtgtgtgtcgttgcaggccttattcaagcttaccatgaagagagtgatcaccctgttcgccgtgctgctgatgggctggagcgtgaacgcctggagcttcgcctgcaagaccgccaacggcaccgccatccccatcggcggcggcagcgccaacgtgtacgtgaacctggcccccgtggtgaacgtgggccagaacctggtggtggacctgagcacccagatcttctgccacaacgactaccccgagaccatcaccgactacgtgaccctgcagagaggcagcgcctacggcggcgtgctgagcaacttcagcggcaccgtgaagtacagcggcagcagctaccccttccccaccaccagcgagacccccagagtggtgtacaacagcagaaccgacaagccctggcccgtggccctgtacctgacccccgtgagcagcgccggcggcgtggccatcaaggccggcagcctgatcgccgtgctgatcctgagacagaccaacaactacaacagcgacgacttccagttcgtgtggaacatctacgccaacaacgacgtggtggtgcccaccggcggctgcgacgtgagcgccagagacgtgaccgtgaccctgcccgactaccccggcagcgtgcccatccccctgaccgtgtactgcgccaagagccagaacctgggctactacctgagcggcaccaccgccgacgccggcaacagcatcttcaccaacaccgccagcttcagccccgcccagggcgtgggcgtgcagctgaccagaaacggcaccatcatccccgccaacaacaccgtgagcctgggcgccgtgggcaccagcgccgtgagcctgggcctgaccgccaactacgccagaaccggcggccaggtgaccgccggcaacgtgcagagcatcatcggcgtgaccttcgtgtaccagcccggcgacggcaacgccgacgtgaccatcaccgtgaacggcaaggtggtggccaagtgatgatgaggactagtccctgttcccagagcccacttttttttctttttttgaaataaaatagcctgtctttcagatctcaaaggctcttttcagagccaccaaaaaaaaaaaaaaaaaaaaaaaaaaaaaaaaaaaaaaaaaaaaaaaaaaaaaaaaaaaaaaaaaaaaaaaaaaaaaaaaaaaaaaaaaaaaaaaaaaaaa

SEQ ID NO: 927 - RNA, 1229 nt, synthetic construct
  misc_feature 1..1229: note Artificial____HsIgE(1-18)_Ec(J96)-FimH(22-300)_Linker-PGDGN _Ec(J96)-FimG(24-37) mRNA opt4
  source 1..1229: mol_type = other RNA
aggagagtcccgcagtcggcgtccagcggctctgcttgttcgtgtgtgtgtcgttgcaggccttattcaagcttaccatggactggacctggatcctgttcctggtggccgccgccaccagagtgcacagcttcgcctgcaagaccgccaacggcaccgccatccccatcggcggcggcagcgccaacgtgtacgtgaacctggcccccgtggtgaacgtgggccagaacctggtggtggacctgagcacccagatcttctgccacaacgactaccccgagaccatcaccgactacgtgaccctgcagagaggcagcgcctacggcggcgtgctgagcaacttcagcggcaccgtgaagtacagcggcagcagctaccccttccccaccaccagcgagacccccagagtggtgtacaacagcagaaccgacaagccctggcccgtggccctgtacctgacccccgtgagcagcgccggcggcgtggccatcaaggccggcagcctgatcgccgtgctgatcctgagacagaccaacaactacaacagcgacgacttccagttcgtgtggaacatctacgccaacaacgacgtggtggtgcccaccggcggctgcgacgtgagcgccagagacgtgaccgtgaccctgcccgactaccccggcagcgtgcccatccccctgaccgtgtactgcgccaagagccagaacctgggctactacctgagcggcaccaccgccgacgccggcaacagcatcttcaccaacaccgccagcttcagccccgcccagggcgtgggcgtgcagctgaccagaaacggcaccatcatccccgccaacaacaccgtgagcctgggcgccgtgggcaccagcgccgtgagcctgggcctgaccgccaactacgccagaaccggcggccaggtgaccgccggcaacgtgcagagcatcatcggcgtgaccttcgtgtaccagcccggcgacggcaacgccgacgtgaccatcaccgtgaacggcaaggtggtggccaagtgatgatgaggactagtccctgttcccagagcccacttttttttctttttttgaaataaaatagcctgtctttcagatctcaaaggctcttttcagagccaccaaaaaaaaaaaaaaaaaaaaaaaaaaaaaaaaaaaaaaaaaaaaaaaaaaaaaaaaaaaaaaaaaaaaaaaaaaaaaaaaaaaaaaaaaaaaaaaaaaaaa

SEQ ID NO: 928 - RNA, 1235 nt, synthetic construct
  misc_feature 1..1235: note Artificial____HsIgE(1-18)_Ec(J96)-FimH(22-300)_Linker-G4SGG _Ec(J96)-FimG(24-37) mRNA opt4
  source 1..1235: mol_type = other RNA
aggagagtcccgcagtcggcgtccagcggctctgcttgttcgtgtgtgtgtcgttgcaggccttattcaagcttaccatggactggacctggatcctgttcctggtggccgccgccaccagagtgcacagcttcgcctgcaagaccgccaacggcaccgccatccccatcggcggcggcagcgccaacgtgtacgtgaacctggcccccgtggtgaacgtgggccagaacctggtggtggacctgagcacccagatcttctgccacaacgactaccccgagaccatcaccgactacgtgaccctgcagagaggcagcgcctacggcggcgtgctgagcaacttcagcggcaccgtgaagtacagcggcagcagctaccccttccccaccaccagcgagacccccagagtggtgtacaacagcagaaccgacaagccctggcccgtggccctgtacctgacccccgtgagcagcgccggcggcgtggccatcaaggccggcagcctgatcgccgtgctgatcctgagacagaccaacaactacaacagcgacgacttccagttcgtgtggaacatctacgccaacaacgacgtggtggtgcccaccggcggctgcgacgtgagcgccagagacgtgaccgtgaccctgcccgactaccccggcagcgtgcccatccccctgaccgtgtactgcgccaagagccagaacctgggctactacctgagcggcaccaccgccgacgccggcaacagcatcttcaccaacaccgccagcttcagccccgcccagggcgtgggcgtgcagctgaccagaaacggcaccatcatccccgccaacaacaccgtgagcctgggcgccgtgggcaccagcgccgtgagcctgggcctgaccgccaactacgccagaaccggcggccaggtgaccgccggcaacgtgcagagcatcatcggcgtgaccttcgtgtaccagggcggcggcggcagcggcggcgccgacgtgaccatcaccgtgaacggcaaggtggtggccaagtgatgatgaggactagtccctgttcccagagcccacttttttttctttttttgaaataaaatagcctgtctttcagatctcaaaggctcttttcagagccaccaaaaaaaaaaaaaaaaaaaaaaaaaaaaaaaaaaaaaaaaaaaaaaaaaaaaaaaaaaaaaaaaaaaaaaaaaaaaaaaaaaaaaaaaaaaaaaaaaaaaa

SEQ ID NO: 929 - RNA, 1235 nt, synthetic construct
  misc_feature 1..1235: note Artificial____MmIgK(1-20)_Ec(J96)-FimH(22-300)_Linker-PGDGN _Ec(J96)-FimG(24-37) mRNA opt4
  source 1..1235: mol_type = other RNA
aggagagtcccgcagtcggcgtccagcggctctgcttgttcgtgtgtgtgtcgttgcaggccttattcaagcttaccatggagaccgacaccctgctgctgtgggtgctgctgctgtgggtgcccggcagcaccggcttcgcctgcaagaccgccaacggcaccgccatccccatcggcggcggcagcgccaacgtgtacgtgaacctggcccccgtggtgaacgtgggccagaacctggtggtggacctgagcacccagatcttctgccacaacgactaccccgagaccatcaccgactacgtgaccctgcagagaggcagcgcctacggcggcgtgctgagcaacttcagcggcaccgtgaagtacagcggcagcagctaccccttccccaccaccagcgagacccccagagtggtgtacaacagcagaaccgacaagccctggcccgtggccctgtacctgacccccgtgagcagcgccggcggcgtggccatcaaggccggcagcctgatcgccgtgctgatcctgagacagaccaacaactacaacagcgacgacttccagttcgtgtggaacatctacgccaacaacgacgtggtggtgcccaccggcggctgcgacgtgagcgccagagacgtgaccgtgaccctgcccgactaccccggcagcgtgcccatccccctgaccgtgtactgcgccaagagccagaacctgggctactacctgagcggcaccaccgccgacgccggcaacagcatcttcaccaacaccgccagcttcagccccgcccagggcgtgggcgtgcagctgaccagaaacggcaccatcatccccgccaacaacaccgtgagcctgggcgccgtgggcaccagcgccgtgagcctgggcctgaccgccaactacgccagaaccggcggccaggtgaccgccggcaacgtgcagagcatcatcggcgtgaccttcgtgtaccagcccggcgacggcaacgccgacgtgaccatcaccgtgaacggcaaggtggtggccaagtgatgatgaggactagtccctgttcccagagcccacttttttttctttttttgaaataaaatagcctgtctttcagatctcaaaggctcttttcagagccaccaaaaaaaaaaaaaaaaaaaaaaaaaaaaaaaaaaaaaaaaaaaaaaaaaaaaaaaaaaaaaaaaaaaaaaaaaaaaaaaaaaaaaaaaaaaaaaaaaaaaa

SEQ ID NO: 930 - RNA, 1235 nt, synthetic construct
  misc_feature 1..1235: note Artificial____MmIgK(1-20)_Ec(536)-FimH(22-300)_Linker-PGDGN _Ec(J96)-FimG(24-37) mRNA opt4
  source 1..1235: mol_type = other RNA
aggagagtcccgcagtcggcgtccagcggctctgcttgttcgtgtgtgtgtcgttgcaggccttattcaagcttaccatggagaccgacaccctgctgctgtgggtgctgctgctgtgggtgcccggcagcaccggcttcgcctgcaagaccgccaacggcaccgccatccccatcggcggcggcagcgccaacgtgtacgtgaacctggcccccgccgtgaacgtgggccagaacctggtggtggacctgagcacccagatcttctgccacaacgactaccccgagaccatcaccgactacgtgaccctgcagagaggcagcgcctacggcggcgtgctgagcagcttcagcggcaccgtgaagtacaacggcagcagctaccccttccccaccaccagcgagacccccagagtggtgtacaacagcagaaccgacaagccctggcccgtggccctgtacctgacccccgtgagcagcgccggcggcgtggccatcaaggccggcagcctgatcgccgtgctgatcctgagacagaccaacaactacaacagcgacgacttccagttcgtgtggaacatctacgccaacaacgacgtggtggtgcccaccggcggctgcgacgtgagcgccagagacgtgaccgtgaccctgcccgactaccccggcagcgtgcccatccccctgaccgtgtactgcgccaagagccagaacctgggctactacctgagcggcaccaccgccgacgccggcaacagcatcttcaccaacaccgccagcttcagccccgcccagggcgtgggcgtgcagctgaccagaaacggcaccatcatccccgccaacaacaccgtgagcctgggcgccgtgggcaccagcgccgtgagcctgggcctgaccgccaactacgccagaaccggcggccaggtgaccgccggcaacgtgcagagcatcatcggcgtgaccttcgtgtaccagcccggcgacggcaacgccgacgtgaccatcaccgtgaacggcaaggtggtggccaagtgatgatgaggactagtccctgttcccagagcccacttttttttctttttttgaaataaaatagcctgtctttcagatctcaaaggctcttttcagagccaccaaaaaaaaaaaaaaaaaaaaaaaaaaaaaaaaaaaaaaaaaaaaaaaaaaaaaaaaaaaaaaaaaaaaaaaaaaaaaaaaaaaaaaaaaaaaaaaaaaaaa

SEQ ID NO: 931 - RNA, 1259 nt, synthetic construct
  misc_feature 1..1259: note Artificial____HsIgE(1-18)_Ec(J96)-FimH(22-300)_Linker-(G4S) 3_Ec(J96)-FimC(135-148) mRNA opt4
  source 1..1259: mol_type = other RNA
aggagagtcccgcagtcggcgtccagcggctctgcttgttcgtgtgtgtgtcgttgcaggccttattcaagcttaccatggactggacctggatcctgttcctggtggccgccgccaccagagtgcacagcttcgcctgcaagaccgccaacggcaccgccatccccatcggcggcggcagcgccaacgtgtacgtgaacctggcccccgtggtgaacgtgggccagaacctggtggtggacctgagcacccagatcttctgccacaacgactaccccgagaccatcaccgactacgtgaccctgcagagaggcagcgcctacggcggcgtgctgagcaacttcagcggcaccgtgaagtacagcggcagcagctaccccttccccaccaccagcgagacccccagagtggtgtacaacagcagaaccgacaagccctggcccgtggccctgtacctgacccccgtgagcagcgccggcggcgtggccatcaaggccggcagcctgatcgccgtgctgatcctgagacagaccaacaactacaacagcgacgacttccagttcgtgtggaacatctacgccaacaacgacgtggtggtgcccaccggcggctgcgacgtgagcgccagagacgtgaccgtgaccctgcccgactaccccggcagcgtgcccatccccctgaccgtgtactgcgccaagagccagaacctgggctactacctgagcggcaccaccgccgacgccggcaacagcatcttcaccaacaccgccagcttcagccccgcccagggcgtgggcgtgcagctgaccagaaacggcaccatcatccccgccaacaacaccgtgagcctgggcgccgtgggcaccagcgccgtgagcctgggcctgaccgccaactacgccagaaccggcggccaggtgaccgccggcaacgtgcagagcatcatcggcgtgaccttcgtgtaccagggcggcggcggcagcggcggcggcggcagcggcggcggcggcagcaccgagaacaccctgcagctggccatcatcagcagaatcaagtgatgatgaggactagtccctgttcccagagcccacttttttttctttttttgaaataaaatagcctgtctttcagatctcaaaggctcttttcagagccaccaaaaaaaaaaaaaaaaaaaaaaaaaaaaaaaaaaaaaaaaaaaaaaaaaaaaaaaaaaaaaaaaaaaaaaaaaaaaaaaaaaaaaaaaaaaaaaaaaaaaa

SEQ ID NO: 932 - RNA, 1682 nt, synthetic construct
  misc_feature 1..1682: note Artificial____LumSynth(1-154_C37A_N102D)_Linker(GGS)4-GGG_E c(J96)-FimH(22-300)_Linker-PGDGN_Ec(J96)-FimG(24-37) mRNA opt4
  source 1..1682: mol_type = other RNA
aggagagtcccgcagtcggcgtccagcggctctgcttgttcgtgtgtgtgtcgttgcaggccttattcaagcttaccatgcagatctacgagggcaagctgaccgccgagggcctgagattcggcatcgtggccagcagattcaaccacgccctggtggacagactggtggagggcgccatcgacgccatcgtgagacacggcggcagagaggaggacatcaccctggtgagagtgcccggcagctgggagatccccgtggccgccggcgagctggccagaaaggaggacatcgacgccgtgatcgccatcggcgtgctgatcagaggcgccaccccccacttcgactacatcgccagcgaggtgagcaagggcctggccgacctgagcctggagctgagaaagcccatcaccttcggcgtgatcaccgccgacaccctggagcaggccatcgagagagccggcaccaagcacggcaacaagggctgggaggccgccctgagcgccatcgagatggccaacctgttcaagagcctgagaggcggcagcggcggcagcggcggcagcggcggcagcggcggcggcttcgcctgcaagaccgccaacggcaccgccatccccatcggcggcggcagcgccaacgtgtacgtgaacctggcccccgtggtgaacgtgggccagaacctggtggtggacctgagcacccagatcttctgccacaacgactaccccgagaccatcaccgactacgtgaccctgcagagaggcagcgcctacggcggcgtgctgagcaacttcagcggcaccgtgaagtacagcggcagcagctaccccttccccaccaccagcgagacccccagagtggtgtacaacagcagaaccgacaagccctggcccgtggccctgtacctgacccccgtgagcagcgccggcggcgtggccatcaaggccggcagcctgatcgccgtgctgatcctgagacagaccaacaactacaacagcgacgacttccagttcgtgtggaacatctacgccaacaacgacgtggtggtgcccaccggcggctgcgacgtgagcgccagagacgtgaccgtgaccctgcccgactaccccggcagcgtgcccatccccctgaccgtgtactgcgccaagagccagaacctgggctactacctgagcggcaccaccgccgacgccggcaacagcatcttcaccaacaccgccagcttcagccccgcccagggcgtgggcgtgcagctgaccagaaacggcaccatcatccccgccaacaacaccgtgagcctgggcgccgtgggcaccagcgccgtgagcctgggcctgaccgccaactacgccagaaccggcggccaggtgaccgccggcaacgtgcagagcatcatcggcgtgaccttcgtgtaccagcccggcgacggcaacgccgacgtgaccatcaccgtgaacggcaaggtggtggccaagtgatgatgaggactagtccctgttcccagagcccacttttttttctttttttgaaataaaatagcctgtctttcagatctcaaaggctcttttcagagccaccaaaaaaaaaaaaaaaaaaaaaaaaaaaaaaaaaaaaaaaaaaaaaaaaaaaaaaaaaaaaaaaaaaaaaaaaaaaaaaaaaaaaaaaaaaaaaaaaaaaaa

SEQ ID NO: 933 - RNA, 1700 nt, synthetic construct
  misc_feature 1..1700: note Artificial____HsIgE(1-18)_Ec(J96)-FimH(22-300)_Linker-PGDGN _Ec(J96)-FimG(24-37)_Linker-SGG_LumSynth(1-154_C37A_N102D) mRNA opt4
  source 1..1700: mol_type = other RNA
aggagagtcccgcagtcggcgtccagcggctctgcttgttcgtgtgtgtgtcgttgcaggccttattcaagcttaccatggactggacctggatcctgttcctggtggccgccgccaccagagtgcacagcttcgcctgcaagaccgccaacggcaccgccatccccatcggcggcggcagcgccaacgtgtacgtgaacctggcccccgtggtgaacgtgggccagaacctggtggtggacctgagcacccagatcttctgccacaacgactaccccgagaccatcaccgactacgtgaccctgcagagaggcagcgcctacggcggcgtgctgagcaacttcagcggcaccgtgaagtacagcggcagcagctaccccttccccaccaccagcgagacccccagagtggtgtacaacagcagaaccgacaagccctggcccgtggccctgtacctgacccccgtgagcagcgccggcggcgtggccatcaaggccggcagcctgatcgccgtgctgatcctgagacagaccaacaactacaacagcgacgacttccagttcgtgtggaacatctacgccaacaacgacgtggtggtgcccaccggcggctgcgacgtgagcgccagagacgtgaccgtgaccctgcccgactaccccggcagcgtgcccatccccctgaccgtgtactgcgccaagagccagaacctgggctactacctgagcggcaccaccgccgacgccggcaacagcatcttcaccaacaccgccagcttcagccccgcccagggcgtgggcgtgcagctgaccagaaacggcaccatcatccccgccaacaacaccgtgagcctgggcgccgtgggcaccagcgccgtgagcctgggcctgaccgccaactacgccagaaccggcggccaggtgaccgccggcaacgtgcagagcatcatcggcgtgaccttcgtgtaccagcccggcgacggcaacgccgacgtgaccatcaccgtgaacggcaaggtggtggccaagagcggcggcatgcagatctacgagggcaagctgaccgccgagggcctgagattcggcatcgtggccagcagattcaaccacgccctggtggacagactggtggagggcgccatcgacgccatcgtgagacacggcggcagagaggaggacatcaccctggtgagagtgcccggcagctgggagatccccgtggccgccggcgagctggccagaaaggaggacatcgacgccgtgatcgccatcggcgtgctgatcagaggcgccaccccccacttcgactacatcgccagcgaggtgagcaagggcctggccgacctgagcctggagctgagaaagcccatcaccttcggcgtgatcaccgccgacaccctggagcaggccatcgagagagccggcaccaagcacggcaacaagggctgggaggccgccctgagcgccatcgagatggccaacctgttcaagagcctgagatgatgatgaggactagtccctgttcccagagcccacttttttttctttttttgaaataaaatagcctgtctttcagatctcaaaggctcttttcagagccaccaaaaaaaaaaaaaaaaaaaaaaaaaaaaaaaaaaaaaaaaaaaaaaaaaaaaaaaaaaaaaaaaaaaaaaaaaaaaaaaaaaaaaaaaaaaaaaaaaaaaa

SEQ ID NO: 934 - RNA, 1727 nt, synthetic construct
  misc_feature 1..1727: note Artificial____HsIgE(1-18)_Ec(J96)-FimH(22-300)_Linker-PGDGN _Ec(J96)-FimG(24-37)_Linker-SGG_Ferritin(5-167_N19Q) mRNA opt4
  source 1..1727: mol_type = other RNA
aggagagtcccgcagtcggcgtccagcggctctgcttgttcgtgtgtgtgtcgttgcaggccttattcaagcttaccatggactggacctggatcctgttcctggtggccgccgccaccagagtgcacagcttcgcctgcaagaccgccaacggcaccgccatccccatcggcggcggcagcgccaacgtgtacgtgaacctggcccccgtggtgaacgtgggccagaacctggtggtggacctgagcacccagatcttctgccacaacgactaccccgagaccatcaccgactacgtgaccctgcagagaggcagcgcctacggcggcgtgctgagcaacttcagcggcaccgtgaagtacagcggcagcagctaccccttccccaccaccagcgagacccccagagtggtgtacaacagcagaaccgacaagccctggcccgtggccctgtacctgacccccgtgagcagcgccggcggcgtggccatcaaggccggcagcctgatcgccgtgctgatcctgagacagaccaacaactacaacagcgacgacttccagttcgtgtggaacatctacgccaacaacgacgtggtggtgcccaccggcggctgcgacgtgagcgccagagacgtgaccgtgaccctgcccgactaccccggcagcgtgcccatccccctgaccgtgtactgcgccaagagccagaacctgggctactacctgagcggcaccaccgccgacgccggcaacagcatcttcaccaacaccgccagcttcagccccgcccagggcgtgggcgtgcagctgaccagaaacggcaccatcatccccgccaacaacaccgtgagcctgggcgccgtgggcaccagcgccgtgagcctgggcctgaccgccaactacgccagaaccggcggccaggtgaccgccggcaacgtgcagagcatcatcggcgtgaccttcgtgtaccagcccggcgacggcaacgccgacgtgaccatcaccgtgaacggcaaggtggtggccaagagcggcggcgacatcatcaagctgctgaacgagcaggtgaacaaggagatgcagagcagcaacctgtacatgagcatgagcagctggtgctacacccacagcctggacggcgccggcctgttcctgttcgaccacgccgccgaggagtacgagcacgccaagaagctgatcatcttcctgaacgagaacaacgtgcccgtgcagctgaccagcatcagcgcccccgagcacaagttcgagggcctgacccagatcttccagaaggcctacgagcacgagcagcacatcagcgagagcatcaacaacatcgtggaccacgccatcaagagcaaggaccacgccaccttcaacttcctgcagtggtacgtggccgagcagcacgaggaggaggtgctgttcaaggacatcctggacaagatcgagctgatcggcaacgagaaccacggcctgtacctggccgaccagtacgtgaagggcatcgccaagagcagaaagagctgatgatgaggactagtccctgttcccagagcccacttttttttctttttttgaaataaaatagcctgtctttcagatctcaaaggctcttttcagagccaccaaaaaaaaaaaaaaaaaaaaaaaaaaaaaaaaaaaaaaaaaaaaaaaaaaaaaaaaaaaaaaaaaaaaaaaaaaaaaaaaaaaaaaaaaaaaaaaaaaaaa

SEQ ID NO: 935 - RNA, 1757 nt, synthetic construct
  misc_feature 1..1757: note Artificial____MmIgK(1-20)_Ec(J96)-FimH(22-300)_Linker-PGDGN _Ec(J96)-FimG(24-37)_Linker-(GGS)4_Ferritin(5-166) mRNA opt4
  source 1..1757: mol_type = other RNA
aggagagtcccgcagtcggcgtccagcggctctgcttgttcgtgtgtgtgtcgttgcaggccttattcaagcttaccatggagaccgacaccctgctgctgtgggtgctgctgctgtgggtgcccggcagcaccggcttcgcctgcaagaccgccaacggcaccgccatccccatcggcggcggcagcgccaacgtgtacgtgaacctggcccccgtggtgaacgtgggccagaacctggtggtggacctgagcacccagatcttctgccacaacgactaccccgagaccatcaccgactacgtgaccctgcagagaggcagcgcctacggcggcgtgctgagcaacttcagcggcaccgtgaagtacagcggcagcagctaccccttccccaccaccagcgagacccccagagtggtgtacaacagcagaaccgacaagccctggcccgtggccctgtacctgacccccgtgagcagcgccggcggcgtggccatcaaggccggcagcctgatcgccgtgctgatcctgagacagaccaacaactacaacagcgacgacttccagttcgtgtggaacatctacgccaacaacgacgtggtggtgcccaccggcggctgcgacgtgagcgccagagacgtgaccgtgaccctgcccgactaccccggcagcgtgcccatccccctgaccgtgtactgcgccaagagccagaacctgggctactacctgagcggcaccaccgccgacgccggcaacagcatcttcaccaacaccgccagcttcagccccgcccagggcgtgggcgtgcagctgaccagaaacggcaccatcatccccgccaacaacaccgtgagcctgggcgccgtgggcaccagcgccgtgagcctgggcctgaccgccaactacgccagaaccggcggccaggtgaccgccggcaacgtgcagagcatcatcggcgtgaccttcgtgtaccagcccggcgacggcaacgccgacgtgaccatcaccgtgaacggcaaggtggtggccaagggcggcagcggcggcagcggcggcagcggcggcagcgacatcatcaagctgctgaacgagcaggtgaacaaggagatgaacagcagcaacctgtacatgagcatgagcagctggtgctacacccacagcctggacggcgccggcctgttcctgttcgaccacgccgccgaggagtacgagcacgccaagaagctgatcatcttcctgaacgagaacaacgtgcccgtgcagctgaccagcatcagcgcccccgagcacaagttcgagggcctgacccagatcttccagaaggcctacgagcacgagcagcacatcagcgagagcatcaacaacatcgtggaccacgccatcaagagcaaggaccacgccaccttcaacttcctgcagtggtacgtggccgagcagcacgaggaggaggtgctgttcaaggacatcctggacaagatcgagctgatcggcaacgagaaccacggcctgtacctggccgaccagtacgtgaagggcatcgccaagagcagaaagtgatgatgaggactagtccctgttcccagagcccacttttttttctttttttgaaataaaatagcctgtctttcagatctcaaaggctcttttcagagccaccaaaaaaaaaaaaaaaaaaaaaaaaaaaaaaaaaaaaaaaaaaaaaaaaaaaaaaaaaaaaaaaaaaaaaaaaaaaaaaaaaaaaaaaaaaaaaaaaaaaaa

SEQ ID NO: 936 - RNA, 1400 nt, synthetic construct
  misc_feature 1..1400: note Artificial____HsIgE(1-18)_Ec(J96)-FimH(22-300)_Linker-PGDGN _Ec(J96)-FimG(24-37)_TMdomain-HA(510-566) mRNA opt4
  source 1..1400: mol_type = other RNA
aggagagtcccgcagtcggcgtccagcggctctgcttgttcgtgtgtgtgtcgttgcaggccttattcaagcttaccatggactggacctggatcctgttcctggtggccgccgccaccagagtgcacagcttcgcctgcaagaccgccaacggcaccgccatccccatcggcggcggcagcgccaacgtgtacgtgaacctggcccccgtggtgaacgtgggccagaacctggtggtggacctgagcacccagatcttctgccacaacgactaccccgagaccatcaccgactacgtgaccctgcagagaggcagcgcctacggcggcgtgctgagcaacttcagcggcaccgtgaagtacagcggcagcagctaccccttccccaccaccagcgagacccccagagtggtgtacaacagcagaaccgacaagccctggcccgtggccctgtacctgacccccgtgagcagcgccggcggcgtggccatcaaggccggcagcctgatcgccgtgctgatcctgagacagaccaacaactacaacagcgacgacttccagttcgtgtggaacatctacgccaacaacgacgtggtggtgcccaccggcggctgcgacgtgagcgccagagacgtgaccgtgaccctgcccgactaccccggcagcgtgcccatccccctgaccgtgtactgcgccaagagccagaacctgggctactacctgagcggcaccaccgccgacgccggcaacagcatcttcaccaacaccgccagcttcagccccgcccagggcgtgggcgtgcagctgaccagaaacggcaccatcatccccgccaacaacaccgtgagcctgggcgccgtgggcaccagcgccgtgagcctgggcctgaccgccaactacgccagaaccggcggccaggtgaccgccggcaacgtgcagagcatcatcggcgtgaccttcgtgtaccagcccggcgacggcaacgccgacgtgaccatcaccgtgaacggcaaggtggtggccaaggccaagctgaacagagaggagatcgacggcgtgaagctggagagcaccagaatctaccagatcctggccatctacagcaccgtggccagcagcctggtgctggtggtgagcctgggcgccatcagcttctggatgtgcagcaacggcagcctgcagtgcagaatctgcatctgatgatgaggactagtccctgttcccagagcccacttttttttctttttttgaaataaaatagcctgtctttcagatctcaaaggctcttttcagagccaccaaaaaaaaaaaaaaaaaaaaaaaaaaaaaaaaaaaaaaaaaaaaaaaaaaaaaaaaaaaaaaaaaaaaaaaaaaaaaaaaaaaaaaaaaaaaaaaaaaaaa

SEQ ID NO: 937 - RNA, 1733 nt, synthetic construct
  misc_feature 1..1733: note Artificial____HsIgE(1-18)_LumSynth(1-154_C37A_N102D)_Linker (GGS)4-GGG_Ec(J96)-FimH(22-300)_Linker-PGDGN_Ec(J96)-FimG(2 4-37) mRNA opt4
  source 1..1733: mol_type = other RNA
aggagagtcccgcagtcggcgtccagcggctctgcttgttcgtgtgtgtgtcgttgcaggccttattcaagcttaccatggactggacctggatcctgttcctggtggccgccgccaccagagtgcacagccagatctacgagggcaagctgaccgccgagggcctgagattcggcatcgtggccagcagattcaaccacgccctggtggacagactggtggagggcgccatcgacgccatcgtgagacacggcggcagagaggaggacatcaccctggtgagagtgcccggcagctgggagatccccgtggccgccggcgagctggccagaaaggaggacatcgacgccgtgatcgccatcggcgtgctgatcagaggcgccaccccccacttcgactacatcgccagcgaggtgagcaagggcctggccgacctgagcctggagctgagaaagcccatcaccttcggcgtgatcaccgccgacaccctggagcaggccatcgagagagccggcaccaagcacggcaacaagggctgggaggccgccctgagcgccatcgagatggccaacctgttcaagagcctgagaggcggcagcggcggcagcggcggcagcggcggcagcggcggcggcttcgcctgcaagaccgccaacggcaccgccatccccatcggcggcggcagcgccaacgtgtacgtgaacctggcccccgtggtgaacgtgggccagaacctggtggtggacctgagcacccagatcttctgccacaacgactaccccgagaccatcaccgactacgtgaccctgcagagaggcagcgcctacggcggcgtgctgagcaacttcagcggcaccgtgaagtacagcggcagcagctaccccttccccaccaccagcgagacccccagagtggtgtacaacagcagaaccgacaagccctggcccgtggccctgtacctgacccccgtgagcagcgccggcggcgtggccatcaaggccggcagcctgatcgccgtgctgatcctgagacagaccaacaactacaacagcgacgacttccagttcgtgtggaacatctacgccaacaacgacgtggtggtgcccaccggcggctgcgacgtgagcgccagagacgtgaccgtgaccctgcccgactaccccggcagcgtgcccatccccctgaccgtgtactgcgccaagagccagaacctgggctactacctgagcggcaccaccgccgacgccggcaacagcatcttcaccaacaccgccagcttcagccccgcccagggcgtgggcgtgcagctgaccagaaacggcaccatcatccccgccaacaacaccgtgagcctgggcgccgtgggcaccagcgccgtgagcctgggcctgaccgccaactacgccagaaccggcggccaggtgaccgccggcaacgtgcagagcatcatcggcgtgaccttcgtgtaccagcccggcgacggcaacgccgacgtgaccatcaccgtgaacggcaaggtggtggccaagtgatgatgaggactagtccctgttcccagagcccacttttttttctttttttgaaataaaatagcctgtctttcagatctcaaaggctcttttcagagccaccaaaaaaaaaaaaaaaaaaaaaaaaaaaaaaaaaaaaaaaaaaaaaaaaaaaaaaaaaaaaaaaaaaaaaaaaaaaaaaaaaaaaaaaaaaaaaaaaaaaaa

SEQ ID NO: 938 - RNA, 1700 nt, synthetic construct
  misc_feature 1..1700: note Artificial____HsIgE(1-18)_Ec(J96)-FimH(22-300_N28S_N91S_N24 9Q)_Linker-PGDGN_Ec(J96)-FimG(24-37)_Linker-SGG_LumSynth(1- 154_C37A_N102D) mRNA opt4
  source 1..1700: mol_type = other RNA
aggagagtcccgcagtcggcgtccagcggctctgcttgttcgtgtgtgtgtcgttgcaggccttattcaagcttaccatggactggacctggatcctgttcctggtggccgccgccaccagagtgcacagcttcgcctgcaagaccgccagcggcaccgccatccccatcggcggcggcagcgccaacgtgtacgtgaacctggcccccgtggtgaacgtgggccagaacctggtggtggacctgagcacccagatcttctgccacaacgactaccccgagaccatcaccgactacgtgaccctgcagagaggcagcgcctacggcggcgtgctgagcagcttcagcggcaccgtgaagtacagcggcagcagctaccccttccccaccaccagcgagacccccagagtggtgtacaacagcagaaccgacaagccctggcccgtggccctgtacctgacccccgtgagcagcgccggcggcgtggccatcaaggccggcagcctgatcgccgtgctgatcctgagacagaccaacaactacaacagcgacgacttccagttcgtgtggaacatctacgccaacaacgacgtggtggtgcccaccggcggctgcgacgtgagcgccagagacgtgaccgtgaccctgcccgactaccccggcagcgtgcccatccccctgaccgtgtactgcgccaagagccagaacctgggctactacctgagcggcaccaccgccgacgccggcaacagcatcttcaccaacaccgccagcttcagccccgcccagggcgtgggcgtgcagctgaccagacagggcaccatcatccccgccaacaacaccgtgagcctgggcgccgtgggcaccagcgccgtgagcctgggcctgaccgccaactacgccagaaccggcggccaggtgaccgccggcaacgtgcagagcatcatcggcgtgaccttcgtgtaccagcccggcgacggcaacgccgacgtgaccatcaccgtgaacggcaaggtggtggccaagagcggcggcatgcagatctacgagggcaagctgaccgccgagggcctgagattcggcatcgtggccagcagattcaaccacgccctggtggacagactggtggagggcgccatcgacgccatcgtgagacacggcggcagagaggaggacatcaccctggtgagagtgcccggcagctgggagatccccgtggccgccggcgagctggccagaaaggaggacatcgacgccgtgatcgccatcggcgtgctgatcagaggcgccaccccccacttcgactacatcgccagcgaggtgagcaagggcctggccgacctgagcctggagctgagaaagcccatcaccttcggcgtgatcaccgccgacaccctggagcaggccatcgagagagccggcaccaagcacggcaacaagggctgggaggccgccctgagcgccatcgagatggccaacctgttcaagagcctgagatgatgatgaggactagtccctgttcccagagcccacttttttttctttttttgaaataaaatagcctgtctttcagatctcaaaggctcttttcagagccaccaaaaaaaaaaaaaaaaaaaaaaaaaaaaaaaaaaaaaaaaaaaaaaaaaaaaaaaaaaaaaaaaaaaaaaaaaaaaaaaaaaaaaaaaaaaaaaaaaaaaa

SEQ ID NO: 939 - RNA, 1700 nt, synthetic construct
  misc_feature 1..1700: note Artificial____HsIgE(1-18)_Ec(J96)-FimH(22-300_N28S_N91S_N24 9Q_N256D)_Linker-PGDGN_Ec(J96)-FimG(24-37)_Linker-SGG_LumSy nth(1-154_C37A_N102D) mRNA opt4
  source 1..1700: mol_type = other RNA
aggagagtcccgcagtcggcgtccagcggctctgcttgttcgtgtgtgtgtcgttgcaggccttattcaagcttaccatggactggacctggatcctgttcctggtggccgccgccaccagagtgcacagcttcgcctgcaagaccgccagcggcaccgccatccccatcggcggcggcagcgccaacgtgtacgtgaacctggcccccgtggtgaacgtgggccagaacctggtggtggacctgagcacccagatcttctgccacaacgactaccccgagaccatcaccgactacgtgaccctgcagagaggcagcgcctacggcggcgtgctgagcagcttcagcggcaccgtgaagtacagcggcagcagctaccccttccccaccaccagcgagacccccagagtggtgtacaacagcagaaccgacaagccctggcccgtggccctgtacctgacccccgtgagcagcgccggcggcgtggccatcaaggccggcagcctgatcgccgtgctgatcctgagacagaccaacaactacaacagcgacgacttccagttcgtgtggaacatctacgccaacaacgacgtggtggtgcccaccggcggctgcgacgtgagcgccagagacgtgaccgtgaccctgcccgactaccccggcagcgtgcccatccccctgaccgtgtactgcgccaagagccagaacctgggctactacctgagcggcaccaccgccgacgccggcaacagcatcttcaccaacaccgccagcttcagccccgcccagggcgtgggcgtgcagctgaccagacagggcaccatcatccccgccgacaacaccgtgagcctgggcgccgtgggcaccagcgccgtgagcctgggcctgaccgccaactacgccagaaccggcggccaggtgaccgccggcaacgtgcagagcatcatcggcgtgaccttcgtgtaccagcccggcgacggcaacgccgacgtgaccatcaccgtgaacggcaaggtggtggccaagagcggcggcatgcagatctacgagggcaagctgaccgccgagggcctgagattcggcatcgtggccagcagattcaaccacgccctggtggacagactggtggagggcgccatcgacgccatcgtgagacacggcggcagagaggaggacatcaccctggtgagagtgcccggcagctgggagatccccgtggccgccggcgagctggccagaaaggaggacatcgacgccgtgatcgccatcggcgtgctgatcagaggcgccaccccccacttcgactacatcgccagcgaggtgagcaagggcctggccgacctgagcctggagctgagaaagcccatcaccttcggcgtgatcaccgccgacaccctggagcaggccatcgagagagccggcaccaagcacggcaacaagggctgggaggccgccctgagcgccatcgagatggccaacctgttcaagagcctgagatgatgatgaggactagtccctgttcccagagcccacttttttttctttttttgaaataaaatagcctgtctttcagatctcaaaggctcttttcagagccaccaaaaaaaaaaaaaaaaaaaaaaaaaaaaaaaaaaaaaaaaaaaaaaaaaaaaaaaaaaaaaaaaaaaaaaaaaaaaaaaaaaaaaaaaaaaaaaaaaaaaa

SEQ ID NO: 940 - RNA, 1700 nt, synthetic construct
  misc_feature 1..1700: note Artificial____HsIgE(1-18)_Ec(J96)-FimH(22-300_N28S_V48C_L55 C_N91S_N249Q)_Linker-PGDGN_Ec(J96)-FimG(24-37)_Linker-SGG_L umSynth(1-154_C37A_N102D) mRNA opt4
  source 1..1700: mol_type = other RNA
aggagagtcccgcagtcggcgtccagcggctctgcttgttcgtgtgtgtgtcgttgcaggccttattcaagcttaccatggactggacctggatcctgttcctggtggccgccgccaccagagtgcacagcttcgcctgcaagaccgccagcggcaccgccatccccatcggcggcggcagcgccaacgtgtacgtgaacctggccccctgcgtgaacgtgggccagaactgcgtggtggacctgagcacccagatcttctgccacaacgactaccccgagaccatcaccgactacgtgaccctgcagagaggcagcgcctacggcggcgtgctgagcagcttcagcggcaccgtgaagtacagcggcagcagctaccccttccccaccaccagcgagacccccagagtggtgtacaacagcagaaccgacaagccctggcccgtggccctgtacctgacccccgtgagcagcgccggcggcgtggccatcaaggccggcagcctgatcgccgtgctgatcctgagacagaccaacaactacaacagcgacgacttccagttcgtgtggaacatctacgccaacaacgacgtggtggtgcccaccggcggctgcgacgtgagcgccagagacgtgaccgtgaccctgcccgactaccccggcagcgtgcccatccccctgaccgtgtactgcgccaagagccagaacctgggctactacctgagcggcaccaccgccgacgccggcaacagcatcttcaccaacaccgccagcttcagccccgcccagggcgtgggcgtgcagctgaccagacagggcaccatcatccccgccaacaacaccgtgagcctgggcgccgtgggcaccagcgccgtgagcctgggcctgaccgccaactacgccagaaccggcggccaggtgaccgccggcaacgtgcagagcatcatcggcgtgaccttcgtgtaccagcccggcgacggcaacgccgacgtgaccatcaccgtgaacggcaaggtggtggccaagagcggcggcatgcagatctacgagggcaagctgaccgccgagggcctgagattcggcatcgtggccagcagattcaaccacgccctggtggacagactggtggagggcgccatcgacgccatcgtgagacacggcggcagagaggaggacatcaccctggtgagagtgcccggcagctgggagatccccgtggccgccggcgagctggccagaaaggaggacatcgacgccgtgatcgccatcggcgtgctgatcagaggcgccaccccccacttcgactacatcgccagcgaggtgagcaagggcctggccgacctgagcctggagctgagaaagcccatcaccttcggcgtgatcaccgccgacaccctggagcaggccatcgagagagccggcaccaagcacggcaacaagggctgggaggccgccctgagcgccatcgagatggccaacctgttcaagagcctgagatgatgatgaggactagtccctgttcccagagcccacttttttttctttttttgaaataaaatagcctgtctttcagatctcaaaggctcttttcagagccaccaaaaaaaaaaaaaaaaaaaaaaaaaaaaaaaaaaaaaaaaaaaaaaaaaaaaaaaaaaaaaaaaaaaaaaaaaaaaaaaaaaaaaaaaaaaaaaaaaaaaa

SEQ ID NO: 941 - RNA, 1700 nt, synthetic construct
  misc_feature 1..1700: note Artificial____HsIgE(1-18)_Ec(J96)-FimH(22-300_F165V)_Linker -PGDGN_Ec(J96)-FimG(24-37)_Linker-SGG_LumSynth(1-154_C37A_N 102D) mRNA opt4
  source 1..1700: mol_type = other RNA
aggagagtcccgcagtcggcgtccagcggctctgcttgttcgtgtgtgtgtcgttgcaggccttattcaagcttaccatggactggacctggatcctgttcctggtggccgccgccaccagagtgcacagcttcgcctgcaagaccgccaacggcaccgccatccccatcggcggcggcagcgccaacgtgtacgtgaacctggcccccgtggtgaacgtgggccagaacctggtggtggacctgagcacccagatcttctgccacaacgactaccccgagaccatcaccgactacgtgaccctgcagagaggcagcgcctacggcggcgtgctgagcaacttcagcggcaccgtgaagtacagcggcagcagctaccccttccccaccaccagcgagacccccagagtggtgtacaacagcagaaccgacaagccctggcccgtggccctgtacctgacccccgtgagcagcgccggcggcgtggccatcaaggccggcagcctgatcgccgtgctgatcctgagacagaccaacaactacaacagcgacgacttccaggtggtgtggaacatctacgccaacaacgacgtggtggtgcccaccggcggctgcgacgtgagcgccagagacgtgaccgtgaccctgcccgactaccccggcagcgtgcccatccccctgaccgtgtactgcgccaagagccagaacctgggctactacctgagcggcaccaccgccgacgccggcaacagcatcttcaccaacaccgccagcttcagccccgcccagggcgtgggcgtgcagctgaccagaaacggcaccatcatccccgccaacaacaccgtgagcctgggcgccgtgggcaccagcgccgtgagcctgggcctgaccgccaactacgccagaaccggcggccaggtgaccgccggcaacgtgcagagcatcatcggcgtgaccttcgtgtaccagcccggcgacggcaacgccgacgtgaccatcaccgtgaacggcaaggtggtggccaagagcggcggcatgcagatctacgagggcaagctgaccgccgagggcctgagattcggcatcgtggccagcagattcaaccacgccctggtggacagactggtggagggcgccatcgacgccatcgtgagacacggcggcagagaggaggacatcaccctggtgagagtgcccggcagctgggagatccccgtggccgccggcgagctggccagaaaggaggacatcgacgccgtgatcgccatcggcgtgctgatcagaggcgccaccccccacttcgactacatcgccagcgaggtgagcaagggcctggccgacctgagcctggagctgagaaagcccatcaccttcggcgtgatcaccgccgacaccctggagcaggccatcgagagagccggcaccaagcacggcaacaagggctgggaggccgccctgagcgccatcgagatggccaacctgttcaagagcctgagatgatgatgaggactagtccctgttcccagagcccacttttttttctttttttgaaataaaatagcctgtctttcagatctcaaaggctcttttcagagccaccaaaaaaaaaaaaaaaaaaaaaaaaaaaaaaaaaaaaaaaaaaaaaaaaaaaaaaaaaaaaaaaaaaaaaaaaaaaaaaaaaaaaaaaaaaaaaaaaaaaaa

SEQ ID NO: 942 - RNA, 1727 nt, synthetic construct
  misc_feature 1..1727: note Artificial____HsIgE(1-18)_Ec(J96)-FimH(22-300_N28S_N91S_N24 9Q)_Linker-PGDGN_Ec(J96)-FimG(24-37)_Linker-SGG_Ferritin(5- 167_N19Q) mRNA opt4
  source 1..1727: mol_type = other RNA
aggagagtcccgcagtcggcgtccagcggctctgcttgttcgtgtgtgtgtcgttgcaggccttattcaagcttaccatggactggacctggatcctgttcctggtggccgccgccaccagagtgcacagcttcgcctgcaagaccgccagcggcaccgccatccccatcggcggcggcagcgccaacgtgtacgtgaacctggcccccgtggtgaacgtgggccagaacctggtggtggacctgagcacccagatcttctgccacaacgactaccccgagaccatcaccgactacgtgaccctgcagagaggcagcgcctacggcggcgtgctgagcagcttcagcggcaccgtgaagtacagcggcagcagctaccccttccccaccaccagcgagacccccagagtggtgtacaacagcagaaccgacaagccctggcccgtggccctgtacctgacccccgtgagcagcgccggcggcgtggccatcaaggccggcagcctgatcgccgtgctgatcctgagacagaccaacaactacaacagcgacgacttccagttcgtgtggaacatctacgccaacaacgacgtggtggtgcccaccggcggctgcgacgtgagcgccagagacgtgaccgtgaccctgcccgactaccccggcagcgtgcccatccccctgaccgtgtactgcgccaagagccagaacctgggctactacctgagcggcaccaccgccgacgccggcaacagcatcttcaccaacaccgccagcttcagccccgcccagggcgtgggcgtgcagctgaccagacagggcaccatcatccccgccaacaacaccgtgagcctgggcgccgtgggcaccagcgccgtgagcctgggcctgaccgccaactacgccagaaccggcggccaggtgaccgccggcaacgtgcagagcatcatcggcgtgaccttcgtgtaccagcccggcgacggcaacgccgacgtgaccatcaccgtgaacggcaaggtggtggccaagagcggcggcgacatcatcaagctgctgaacgagcaggtgaacaaggagatgcagagcagcaacctgtacatgagcatgagcagctggtgctacacccacagcctggacggcgccggcctgttcctgttcgaccacgccgccgaggagtacgagcacgccaagaagctgatcatcttcctgaacgagaacaacgtgcccgtgcagctgaccagcatcagcgcccccgagcacaagttcgagggcctgacccagatcttccagaaggcctacgagcacgagcagcacatcagcgagagcatcaacaacatcgtggaccacgccatcaagagcaaggaccacgccaccttcaacttcctgcagtggtacgtggccgagcagcacgaggaggaggtgctgttcaaggacatcctggacaagatcgagctgatcggcaacgagaaccacggcctgtacctggccgaccagtacgtgaagggcatcgccaagagcagaaagagctgatgatgaggactagtccctgttcccagagcccacttttttttctttttttgaaataaaatagcctgtctttcagatctcaaaggctcttttcagagccaccaaaaaaaaaaaaaaaaaaaaaaaaaaaaaaaaaaaaaaaaaaaaaaaaaaaaaaaaaaaaaaaaaaaaaaaaaaaaaaaaaaaaaaaaaaaaaaaaaaaaa

SEQ ID NO: 943 - RNA, 1727 nt, synthetic construct
  misc_feature 1..1727: note Artificial____HsIgE(1-18)_Ec(J96)-FimH(22-300_N28S_N91S_N24 9Q_N256D)_Linker-PGDGN_Ec(J96)-FimG(24-37)_Linker-SGG_Ferri tin(5-167_N19Q) mRNA opt4
  source 1..1727: mol_type = other RNA
aggagagtcccgcagtcggcgtccagcggctctgcttgttcgtgtgtgtgtcgttgcaggccttattcaagcttaccatggactggacctggatcctgttcctggtggccgccgccaccagagtgcacagcttcgcctgcaagaccgccagcggcaccgccatccccatcggcggcggcagcgccaacgtgtacgtgaacctggcccccgtggtgaacgtgggccagaacctggtggtggacctgagcacccagatcttctgccacaacgactaccccgagaccatcaccgactacgtgaccctgcagagaggcagcgcctacggcggcgtgctgagcagcttcagcggcaccgtgaagtacagcggcagcagctaccccttccccaccaccagcgagacccccagagtggtgtacaacagcagaaccgacaagccctggcccgtggccctgtacctgacccccgtgagcagcgccggcggcgtggccatcaaggccggcagcctgatcgccgtgctgatcctgagacagaccaacaactacaacagcgacgacttccagttcgtgtggaacatctacgccaacaacgacgtggtggtgcccaccggcggctgcgacgtgagcgccagagacgtgaccgtgaccctgcccgactaccccggcagcgtgcccatccccctgaccgtgtactgcgccaagagccagaacctgggctactacctgagcggcaccaccgccgacgccggcaacagcatcttcaccaacaccgccagcttcagccccgcccagggcgtgggcgtgcagctgaccagacagggcaccatcatccccgccgacaacaccgtgagcctgggcgccgtgggcaccagcgccgtgagcctgggcctgaccgccaactacgccagaaccggcggccaggtgaccgccggcaacgtgcagagcatcatcggcgtgaccttcgtgtaccagcccggcgacggcaacgccgacgtgaccatcaccgtgaacggcaaggtggtggccaagagcggcggcgacatcatcaagctgctgaacgagcaggtgaacaaggagatgcagagcagcaacctgtacatgagcatgagcagctggtgctacacccacagcctggacggcgccggcctgttcctgttcgaccacgccgccgaggagtacgagcacgccaagaagctgatcatcttcctgaacgagaacaacgtgcccgtgcagctgaccagcatcagcgcccccgagcacaagttcgagggcctgacccagatcttccagaaggcctacgagcacgagcagcacatcagcgagagcatcaacaacatcgtggaccacgccatcaagagcaaggaccacgccaccttcaacttcctgcagtggtacgtggccgagcagcacgaggaggaggtgctgttcaaggacatcctggacaagatcgagctgatcggcaacgagaaccacggcctgtacctggccgaccagtacgtgaagggcatcgccaagagcagaaagagctgatgatgaggactagtccctgttcccagagcccacttttttttctttttttgaaataaaatagcctgtctttcagatctcaaaggctcttttcagagccaccaaaaaaaaaaaaaaaaaaaaaaaaaaaaaaaaaaaaaaaaaaaaaaaaaaaaaaaaaaaaaaaaaaaaaaaaaaaaaaaaaaaaaaaaaaaaaaaaaaaaa

SEQ ID NO: 944 - RNA, 1727 nt, synthetic construct
  misc_feature 1..1727: note Artificial____HsIgE(1-18)_Ec(J96)-FimH(22-300_N28S_V48C_L55 C_N91S_N249Q)_Linker-PGDGN_Ec(J96)-FimG(24-37)_Linker-SGG_F erritin(5-167_N19Q) mRNA opt4
  source 1..1727: mol_type = other RNA
aggagagtcccgcagtcggcgtccagcggctctgcttgttcgtgtgtgtgtcgttgcaggccttattcaagcttaccatggactggacctggatcctgttcctggtggccgccgccaccagagtgcacagcttcgcctgcaagaccgccagcggcaccgccatccccatcggcggcggcagcgccaacgtgtacgtgaacctggccccctgcgtgaacgtgggccagaactgcgtggtggacctgagcacccagatcttctgccacaacgactaccccgagaccatcaccgactacgtgaccctgcagagaggcagcgcctacggcggcgtgctgagcagcttcagcggcaccgtgaagtacagcggcagcagctaccccttccccaccaccagcgagacccccagagtggtgtacaacagcagaaccgacaagccctggcccgtggccctgtacctgacccccgtgagcagcgccggcggcgtggccatcaaggccggcagcctgatcgccgtgctgatcctgagacagaccaacaactacaacagcgacgacttccagttcgtgtggaacatctacgccaacaacgacgtggtggtgcccaccggcggctgcgacgtgagcgccagagacgtgaccgtgaccctgcccgactaccccggcagcgtgcccatccccctgaccgtgtactgcgccaagagccagaacctgggctactacctgagcggcaccaccgccgacgccggcaacagcatcttcaccaacaccgccagcttcagccccgcccagggcgtgggcgtgcagctgaccagacagggcaccatcatccccgccaacaacaccgtgagcctgggcgccgtgggcaccagcgccgtgagcctgggcctgaccgccaactacgccagaaccggcggccaggtgaccgccggcaacgtgcagagcatcatcggcgtgaccttcgtgtaccagcccggcgacggcaacgccgacgtgaccatcaccgtgaacggcaaggtggtggccaagagcggcggcgacatcatcaagctgctgaacgagcaggtgaacaaggagatgcagagcagcaacctgtacatgagcatgagcagctggtgctacacccacagcctggacggcgccggcctgttcctgttcgaccacgccgccgaggagtacgagcacgccaagaagctgatcatcttcctgaacgagaacaacgtgcccgtgcagctgaccagcatcagcgcccccgagcacaagttcgagggcctgacccagatcttccagaaggcctacgagcacgagcagcacatcagcgagagcatcaacaacatcgtggaccacgccatcaagagcaaggaccacgccaccttcaacttcctgcagtggtacgtggccgagcagcacgaggaggaggtgctgttcaaggacatcctggacaagatcgagctgatcggcaacgagaaccacggcctgtacctggccgaccagtacgtgaagggcatcgccaagagcagaaagagctgatgatgaggactagtccctgttcccagagcccacttttttttctttttttgaaataaaatagcctgtctttcagatctcaaaggctcttttcagagccaccaaaaaaaaaaaaaaaaaaaaaaaaaaaaaaaaaaaaaaaaaaaaaaaaaaaaaaaaaaaaaaaaaaaaaaaaaaaaaaaaaaaaaaaaaaaaaaaaaaaaa

SEQ ID NO: 945 - RNA, 1727 nt, synthetic construct
  misc_feature 1..1727: note Artificial____HsIgE(1-18)_Ec(J96)-FimH(22-300_F165V)_Linker -PGDGN_Ec(J96)-FimG(24-37)_Linker-SGG_Ferritin(5-167_N19Q) mRNA opt4
  source 1..1727: mol_type = other RNA
aggagagtcccgcagtcggcgtccagcggctctgcttgttcgtgtgtgtgtcgttgcaggccttattcaagcttaccatggactggacctggatcctgttcctggtggccgccgccaccagagtgcacagcttcgcctgcaagaccgccaacggcaccgccatccccatcggcggcggcagcgccaacgtgtacgtgaacctggcccccgtggtgaacgtgggccagaacctggtggtggacctgagcacccagatcttctgccacaacgactaccccgagaccatcaccgactacgtgaccctgcagagaggcagcgcctacggcggcgtgctgagcaacttcagcggcaccgtgaagtacagcggcagcagctaccccttccccaccaccagcgagacccccagagtggtgtacaacagcagaaccgacaagccctggcccgtggccctgtacctgacccccgtgagcagcgccggcggcgtggccatcaaggccggcagcctgatcgccgtgctgatcctgagacagaccaacaactacaacagcgacgacttccaggtggtgtggaacatctacgccaacaacgacgtggtggtgcccaccggcggctgcgacgtgagcgccagagacgtgaccgtgaccctgcccgactaccccggcagcgtgcccatccccctgaccgtgtactgcgccaagagccagaacctgggctactacctgagcggcaccaccgccgacgccggcaacagcatcttcaccaacaccgccagcttcagccccgcccagggcgtgggcgtgcagctgaccagaaacggcaccatcatccccgccaacaacaccgtgagcctgggcgccgtgggcaccagcgccgtgagcctgggcctgaccgccaactacgccagaaccggcggccaggtgaccgccggcaacgtgcagagcatcatcggcgtgaccttcgtgtaccagcccggcgacggcaacgccgacgtgaccatcaccgtgaacggcaaggtggtggccaagagcggcggcgacatcatcaagctgctgaacgagcaggtgaacaaggagatgcagagcagcaacctgtacatgagcatgagcagctggtgctacacccacagcctggacggcgccggcctgttcctgttcgaccacgccgccgaggagtacgagcacgccaagaagctgatcatcttcctgaacgagaacaacgtgcccgtgcagctgaccagcatcagcgcccccgagcacaagttcgagggcctgacccagatcttccagaaggcctacgagcacgagcagcacatcagcgagagcatcaacaacatcgtggaccacgccatcaagagcaaggaccacgccaccttcaacttcctgcagtggtacgtggccgagcagcacgaggaggaggtgctgttcaaggacatcctggacaagatcgagctgatcggcaacgagaaccacggcctgtacctggccgaccagtacgtgaagggcatcgccaagagcagaaagagctgatgatgaggactagtccctgttcccagagcccacttttttttctttttttgaaataaaatagcctgtctttcagatctcaaaggctcttttcagagccaccaaaaaaaaaaaaaaaaaaaaaaaaaaaaaaaaaaaaaaaaaaaaaaaaaaaaaaaaaaaaaaaaaaaaaaaaaaaaaaaaaaaaaaaaaaaaaaaaaaaaa

SEQ ID NO: 946 - RNA, 1004 nt, synthetic construct
  misc_feature 1..1004: note Artificial____Ec(J96)-FimC(1-36)_Ec(J96)-FimC(37-241) mRNA opt5
  source 1..1004: mol_type = other RNA
aggagagtcccgcagtcggcgtccagcggctctgcttgttcgtgtgtgtgtcgttgcaggccttattcaagcttaccatgagcaacaagaatgtgaacgtcagaaaatcccaggagatcaccttctgcctgctcgccggcattctgatgtttatggctatgatggttgccgggcgggcggaagctggagtggcccttggcgccacacgcgtgatctaccccgctgggcaaaagcaggtccagctggccgtgacgaataacgacgaaaattctacctatctcattcagagctgggttgagaacgctgatggagtgaaagacggcagattcatcgtcacacctccgctgtttgccatgaaggggaaaaaggagaatacccttcggattctggatgcgacaaacaatcaactcccccaggaccgcgaatccctgttctggatgaacgtgaaggccatcccttctatggataaaagcaagctgaccgagaatacactccagctggctatcatttccagaatcaaactttactatcggcccgccaagctggctctccctcccgaccaggccgcggagaaactgcgctttagacggtctgccaacagccttaccctgattaatcctacgccgtactatctcaccgttacagaactgaacgctggaacccgcgtgctggagaatgccctcgtgccccctatgggcgaatccacagtcaagctgcccagcgatgctggctctaacatcacctacagaacgattaacgactatggggcccttacacctaagatgaccggagtgatggagtgatgatgaggactagtccctgttcccagagcccacttttttttctttttttgaaataaaatagcctgtctttcagatctcaaaggctcttttcagagccaccaaaaaaaaaaaaaaaaaaaaaaaaaaaaaaaaaaaaaaaaaaaaaaaaaaaaaaaaaaaaaaaaaaaaaaaaaaaaaaaaaaaaaaaaaaaaaaaaaaaaa

SEQ ID NO: 947 - RNA, 950 nt, synthetic construct
  misc_feature 1..950: note = Artificial____HsIgE(1-18)_Ec(J96)-FimC(37-241) mRNA opt5
  source 1..950: mol_type = other RNA
aggagagtcccgcagtcggcgtccagcggctctgcttgttcgtgtgtgtgtcgttgcaggccttattcaagcttaccatggactggacctggatcctgttcctcgtggccgctgccacaagagtccacagcggcgttgcgctgggggctacgcgggtgatttaccccgccggacagaagcaagtgcagcttgccgtcaccaacaatgatgagaactccacatatctgatccagtcttgggtggaaaatgctgacggcgttaaagatgggcgctttattgtgacccctcccctcttcgccatgaagggaaagaaggagaacacactgagaatccttgacgctaccaataaccagctgccgcaagatcgggaaagcctcttttggatgaatgtcaaagccattccttccatggacaagtctaagctgacagagaacaccctgcagctcgcgatcatcagccgcattaaactgtactatagacccgccaaacttgctctgcctcccgatcaggccgctgaaaaactccggttccgcagatccgccaattctctgacgcttatcaaccctaccccgtactatctgacagtgaccgagctcaatgcgggcacacgggttctggagaacgccctggtgccccctatgggggaaagcaccgtcaagctcccctccgacgctggaagcaatattacgtaccgcacaatcaacgattatggcgccctgacccctaaaatgacaggcgtgatggagtgatgatgaggactagtccctgttcccagagcccacttttttttctttttttgaaataaaatagcctgtctttcagatctcaaaggctcttttcagagccaccaaaaaaaaaaaaaaaaaaaaaaaaaaaaaaaaaaaaaaaaaaaaaaaaaaaaaaaaaaaaaaaaaaaaaaaaaaaaaaaaaaaaaaaaaaaaaaaaaaaaa

SEQ ID NO: 948 - RNA, 1181 nt, synthetic construct
  misc_feature 1..1181: note Artificial____Ec(J96)-FimH(1-21)_Ec(J96)-FimH(22-300) mRNA opt5
  source 1..1181: mol_type = other RNA
aggagagtcccgcagtcggcgtccagcggctctgcttgttcgtgtgtgtgtcgttgcaggccttattcaagcttaccatgaagagagtgatcaccctgttcgccgtcctcctgatgggctggagcgttaacgcttggtcctttgcctgcaaaacagcgaatgggacggctattcccatcggaggcgggtctgccaacgtgtacgtgaatcttgcccctgtcgtgaacgttggacagaatctggtggtcgacctcagcacccaaattttctgtcacaacgattatccggagacaatcaccgactacgtgacactgcagcggggctccgcttatgggggagttctttctaattttagcggcaccgtgaagtactccggctctagctatcccttccctacaacctccgaaacgccccgcgtcgtgtacaacagcagaaccgataaaccttggcccgtggccctgtatctcacacctgtctcttccgctgggggagttgccattaaggcgggcagcctgatcgccgtgctgatcctccggcagaccaataactacaattctgacgattttcagttcgtgtggaacatttacgctaataacgacgtcgtggttccgacagggggatgcgatgtgtccgcccgcgacgtcaccgtgacgctgcccgattatcctggcagcgttcccatccctcttacagtgtactgtgctaaatctcaaaatctggggtattacctctccggaaccacagccgacgcgggcaacagcatttttaccaacaccgcctccttctctcccgctcagggcgtcggggtgcagctgacaagaaatggaacgatcattccggccaacaataccgtcagccttggcgctgtggggacatccgccgttagcctgggactcaccgccaactatgctcggacaggcggacaggtgaccgcggggaatgtccaatctatcattggcgtgacgtttgtttaccagtgatgatgaggactagtccctgttcccagagcccacttttttttctttttttgaaataaaatagcctgtctttcagatctcaaaggctcttttcagagccaccaaaaaaaaaaaaaaaaaaaaaaaaaaaaaaaaaaaaaaaaaaaaaaaaaaaaaaaaaaaaaaaaaaaaaaaaaaaaaaaaaaaaaaaaaaaaaaaaaaaaa

SEQ ID NO: 949 - RNA, 1172 nt, synthetic construct
  misc_feature 1..1172: note = Artificial____HsIgE(1-18)_Ec(J96)-FimH(22-300) mRNA opt5
  source 1..1172: mol_type = other RNA
aggagagtcccgcagtcggcgtccagcggctctgcttgttcgtgtgtgtgtcgttgcaggccttattcaagcttaccatggactggacctggatcctgttcctcgtggccgctgccacaagagtccacagctttgcgtgcaagacggctaacggcaccgccattcccatcgggggaggctccgccaatgtttacgtgaacctggctcctgtggtcaatgtggggcagaaccttgttgtggatctgtctacacaaattttctgtcataatgactatccggagaccatcacagattacgtcaccctccagcggggaagcgcctatggcggggtgctgtccaacttttctggaacagttaaatacagcggctcctcttatcccttccctaccacgagcgaaacaccccgcgtggtctacaattccagaaccgacaagccttggcccgtggctctttatctgacccctgtgagctctgccggcggggtcgcgattaaagccggatccctcatcgctgttctgatcctgcggcagacaaacaattacaacagcgatgactttcagttcgtgtggaatatttacgccaacaatgatgtggtcgtgccgaccggcgggtgcgacgtttctgctcgcgatgtgacggtcacactccccgactatcctggatccgtgcccatccctctgaccgtttactgtgccaagagccaaaaccttggctattacctgtctgggacaaccgcggatgccggaaattccatttttaccaacacagctagcttctcccccgcccagggcgtgggcgtccagctcacgagaaacgggaccatcattccggctaataacacagtgtctctgggagccgtcggcaccagcgccgtgtcccttgggctgacagctaattatgcgcggaccggaggccaggttacggccgggaacgtgcaaagcatcattggagtcacatttgtgtaccagtgatgatgaggactagtccctgttcccagagcccacttttttttctttttttgaaataaaatagcctgtctttcagatctcaaaggctcttttcagagccaccaaaaaaaaaaaaaaaaaaaaaaaaaaaaaaaaaaaaaaaaaaaaaaaaaaaaaaaaaaaaaaaaaaaaaaaaaaaaaaaaaaaaaaaaaaaaaaaaaaaaa

SEQ ID NO: 950 - RNA, 1178 nt, synthetic construct
  misc_feature 1..1178: note = Artificial____MmIgK(1-20)_Ec(J96)-FimH(22-300) mRNA opt5
  source 1..1178: mol_type = other RNA
aggagagtcccgcagtcggcgtccagcggctctgcttgttcgtgtgtgtgtcgttgcaggccttattcaagcttaccatggagaccgacacactgctcctgtgggtgcttctgctctgggtccccggcagcacggggttcgcctgcaagaccgctaacggaacagccatccctattggcgggggatccgcgaatgtttacgtgaacctggctccggtggtcaatgtgggccagaaccttgttgtggatctgtctacccaaatcttttgtcacaatgactatcccgaaacaattaccgattacgtcacactccagagagggagcgcctatggaggcgtgctgtccaacttctctggcaccgttaaatacagcgggtcctcttatccttttcccacgaccagcgagacacctcgggtggtctacaattcccgcaccgacaagccctggcctgtggccctgtatctcacaccggtgagctctgctggaggcgtcgccatcaaagctgggtccctgattgccgttcttatcctgagacagaccaacaattacaacagcgatgacttccagtttgtgtggaatatctacgcgaacaatgatgtggtcgtgcccacgggaggctgcgacgtttctgcccgggatgtgacagtcaccctccctgactatcccgggtccgtgcctattcccctgacagtttactgtgctaagagccaaaaccttggatattacctgtctggcaccaccgccgatgctggcaattccatcttcacaaacacggccagcttttccccggcgcagggggtgggagtccagctcacccgcaacggcacaattatccctgccaataacaccgtgtctctgggggctgtcggaacaagcgccgtgtccctgggcctcaccgctaattatgccagaacagggggacaggttacggccggcaacgtgcaaagcattatcggcgtcaccttcgtgtaccagtgatgatgaggactagtccctgttcccagagcccacttttttttctttttttgaaataaaatagcctgtctttcagatctcaaaggctcttttcagagccaccaaaaaaaaaaaaaaaaaaaaaaaaaaaaaaaaaaaaaaaaaaaaaaaaaaaaaaaaaaaaaaaaaaaaaaaaaaaaaaaaaaaaaaaaaaaaaaaaaaaaa

SEQ ID NO: 951 - RNA, 1238 nt, synthetic construct
  misc_feature 1..1238: note Artificial____Ec(J96)-FimH(1-21)_Ec(J96)-FimH(22-300)_Linke r-PGDGN_Ec(J96)-FimG(24-37) mRNA opt5
  source 1..1238: mol_type = other RNA
aggagagtcccgcagtcggcgtccagcggctctgcttgttcgtgtgtgtgtcgttgcaggccttattcaagcttaccatgaagagagtgatcaccctgttcgccgtcctcctgatgggctggagcgttaacgcttggtcctttgcctgcaaaacagcgaatgggacggctattcccatcggaggcgggtctgccaacgtgtacgtgaatcttgcccctgtcgtgaacgttggacagaatctggtggtcgacctcagcacccaaattttctgtcacaacgattatccggagacaatcaccgactacgtgacactgcagcggggctccgcttatgggggagttctttctaattttagcggcaccgtgaagtactccggctctagctatcccttccctacaacctccgaaacgccccgcgtcgtgtacaacagcagaaccgataaaccttggcccgtggccctgtatctcacacctgtctcttccgctgggggagttgccattaaggcgggcagcctgatcgccgtgctgatcctccggcagaccaataactacaattctgacgattttcagttcgtgtggaacatttacgctaataacgacgtcgtggttccgacagggggatgcgatgtgtccgcccgcgacgtcaccgtgacgctgcccgattatcctggcagcgttcccatccctcttacagtgtactgtgctaaatctcaaaatctggggtattacctctccggaaccacagccgacgcgggcaacagcatttttaccaacaccgcctccttctctcccgctcagggcgtcggggtgcagctgacaagaaatggaacgatcattccggccaacaataccgtcagccttggcgctgtggggacatccgccgttagcctgggactcaccgccaactatgctcggacaggcggacaggtgaccgcggggaatgtccaatctatcattggcgtgacgtttgtttaccagcctggcgatgggaacgccgacgtgacaatcaccgtcaatggaaaggtggtggctaagtgatgatgaggactagtccctgttcccagagcccacttttttttctttttttgaaataaaatagcctgtctttcagatctcaaaggctcttttcagagccaccaaaaaaaaaaaaaaaaaaaaaaaaaaaaaaaaaaaaaaaaaaaaaaaaaaaaaaaaaaaaaaaaaaaaaaaaaaaaaaaaaaaaaaaaaaaaaaaaaaaaa

SEQ ID NO: 952 - RNA, 1229 nt, synthetic construct
  misc_feature 1..1229: note Artificial____HsIgE(1-18)_Ec(J96)-FimH(22-300)_Linker-PGDGN _Ec(J96)-FimG(24-37) mRNA opt5
  source 1..1229: mol_type = other RNA
aggagagtcccgcagtcggcgtccagcggctctgcttgttcgtgtgtgtgtcgttgcaggccttattcaagcttaccatggactggacctggatcctgttcctcgtggccgctgccacaagagtccacagctttgcgtgcaagacggctaacggcaccgccattcccatcgggggaggctccgccaatgtttacgtgaacctggctcctgtggtcaatgtggggcagaaccttgttgtggatctgtctacacaaattttctgtcataatgactatccggagaccatcacagattacgtcaccctccagcggggaagcgcctatggcggggtgctgtccaacttttctggaacagttaaatacagcggctcctcttatcccttccctaccacgagcgaaacaccccgcgtggtctacaattccagaaccgacaagccttggcccgtggctctttatctgacccctgtgagctctgccggcggggtcgcgattaaagccggatccctcatcgctgttctgatcctgcggcagacaaacaattacaacagcgatgactttcagttcgtgtggaatatttacgccaacaatgatgtggtcgtgccgaccggcgggtgcgacgtttctgctcgcgatgtgacggtcacactccccgactatcctggatccgtgcccatccctctgaccgtttactgtgccaagagccaaaaccttggctattacctgtctgggacaaccgcggatgccggaaattccatttttaccaacacagctagcttctcccccgcccagggcgtgggcgtccagctcacgagaaacgggaccatcattccggctaataacacagtgtctctgggagccgtcggcaccagcgccgtgtcccttgggctgacagctaattatgcgcggaccggaggccaggttacggccgggaacgtgcaaagcatcattggagtcacatttgtgtaccagcctggcgacggcaatgctgatgttaccatcaccgtgaacgggaaagtcgtggccaagtgatgatgaggactagtccctgttcccagagcccacttttttttctttttttgaaataaaatagcctgtctttcagatctcaaaggctcttttcagagccaccaaaaaaaaaaaaaaaaaaaaaaaaaaaaaaaaaaaaaaaaaaaaaaaaaaaaaaaaaaaaaaaaaaaaaaaaaaaaaaaaaaaaaaaaaaaaaaaaaaaaa

SEQ ID NO: 953 - RNA, 1235 nt, synthetic construct
  misc_feature 1..1235: note Artificial____HsIgE(1-18)_Ec(J96)-FimH(22-300)_Linker-G4SGG _Ec(J96)-FimG(24-37) mRNA opt5
  source 1..1235: mol_type = other RNA
aggagagtcccgcagtcggcgtccagcggctctgcttgttcgtgtgtgtgtcgttgcaggccttattcaagcttaccatggactggacctggatcctgttcctcgtggccgctgccacaagagtccacagctttgcgtgcaagacggctaacggcaccgccattcccatcgggggaggctccgccaatgtttacgtgaacctggctcctgtggtcaatgtggggcagaaccttgttgtggatctgtctacacaaattttctgtcataatgactatccggagaccatcacagattacgtcaccctccagcggggaagcgcctatggcggggtgctgtccaacttttctggaacagttaaatacagcggctcctcttatcccttccctaccacgagcgaaacaccccgcgtggtctacaattccagaaccgacaagccttggcccgtggctctttatctgacccctgtgagctctgccggcggggtcgcgattaaagccggatccctcatcgctgttctgatcctgcggcagacaaacaattacaacagcgatgactttcagttcgtgtggaatatttacgccaacaatgatgtggtcgtgccgaccggcgggtgcgacgtttctgctcgcgatgtgacggtcacactccccgactatcctggatccgtgcccatccctctgaccgtttactgtgccaagagccaaaaccttggctattacctgtctgggacaaccgcggatgccggaaattccatttttaccaacacagctagcttctcccccgcccagggcgtgggcgtccagctcacgagaaacgggaccatcattccggctaataacacagtgtctctgggagccgtcggcaccagcgccgtgtcccttgggctgacagctaattatgcgcggaccggaggccaggttacggccgggaacgtgcaaagcatcattggagtcacatttgtgtaccagggcggcgggggatctggcggggctgacgttaccatcaccgtgaatggaaaagtcgtggccaagtgatgatgaggactagtccctgttcccagagcccacttttttttctttttttgaaataaaatagcctgtctttcagatctcaaaggctcttttcagagccaccaaaaaaaaaaaaaaaaaaaaaaaaaaaaaaaaaaaaaaaaaaaaaaaaaaaaaaaaaaaaaaaaaaaaaaaaaaaaaaaaaaaaaaaaaaaaaaaaaaaaa

SEQ ID NO: 954 - RNA, 1235 nt, synthetic construct
  misc_feature 1..1235: note Artificial____MmIgK(1-20)_Ec(J96)-FimH(22-300)_Linker-PGDGN _Ec(J96)-FimG(24-37) mRNA opt5
  source 1..1235: mol_type = other RNA
aggagagtcccgcagtcggcgtccagcggctctgcttgttcgtgtgtgtgtcgttgcaggccttattcaagcttaccatggagaccgacacactgctcctgtgggtgcttctgctctgggtccccggcagcacggggttcgcctgcaagaccgctaacggaacagccatccctattggcgggggatccgcgaatgtttacgtgaacctggctccggtggtcaatgtgggccagaaccttgttgtggatctgtctacccaaatcttttgtcacaatgactatcccgaaacaattaccgattacgtcacactccagagagggagcgcctatggaggcgtgctgtccaacttctctggcaccgttaaatacagcgggtcctcttatccttttcccacgaccagcgagacacctcgggtggtctacaattcccgcaccgacaagccctggcctgtggccctgtatctcacaccggtgagctctgctggaggcgtcgccatcaaagctgggtccctgattgccgttcttatcctgagacagaccaacaattacaacagcgatgacttccagtttgtgtggaatatctacgcgaacaatgatgtggtcgtgcccacgggaggctgcgacgtttctgcccgggatgtgacagtcaccctccctgactatcccgggtccgtgcctattcccctgacagtttactgtgctaagagccaaaaccttggatattacctgtctggcaccaccgccgatgctggcaattccatcttcacaaacacggccagcttttccccggcgcagggggtgggagtccagctcacccgcaacggcacaattatccctgccaataacaccgtgtctctgggggctgtcggaacaagcgccgtgtccctgggcctcaccgctaattatgccagaacagggggacaggttacggccggcaacgtgcaaagcattatcggcgtcaccttcgtgtaccagcccggggacggaaatgctgatgttaccattacagtgaacggcaaagtcgtggcgaagtgatgatgaggactagtccctgttcccagagcccacttttttttctttttttgaaataaaatagcctgtctttcagatctcaaaggctcttttcagagccaccaaaaaaaaaaaaaaaaaaaaaaaaaaaaaaaaaaaaaaaaaaaaaaaaaaaaaaaaaaaaaaaaaaaaaaaaaaaaaaaaaaaaaaaaaaaaaaaaaaaaa

SEQ ID NO: 955 - RNA, 1235 nt, synthetic construct
  misc_feature 1..1235: note Artificial____MmIgK(1-20)_Ec(536)-FimH(22-300)_Linker-PGDGN _Ec(J96)-FimG(24-37) mRNA opt5
  source 1..1235: mol_type = other RNA
aggagagtcccgcagtcggcgtccagcggctctgcttgttcgtgtgtgtgtcgttgcaggccttattcaagcttaccatggagaccgacacactgctcctgtgggtgcttctgctctgggtccccggcagcacggggttcgcctgcaagaccgctaacggaacagccatccctattggcgggggatccgcgaatgtttacgtgaacctggctccggccgtgaatgtcggccagaaccttgtggttgatctgtctacccaaatcttttgtcacaatgactatcccgaaacaattaccgattacgtgacactccagagagggagcgcctatggaggcgtcctgtcctctttcagcggcaccgtgaaatacaacgggtcctcttatccttttcccacgaccagcgagacacctcgggttgtgtacaattcccgcaccgacaagccctggcctgtcgctctgtatctcacaccggtgagctctgccggaggcgtggctatcaaagccgggtccctgattgcggtccttatcctgagacagaccaacaattacaacagcgatgacttccagtttgtttggaatatctacgccaacaatgatgtggtggtccccacgggaggctgcgacgtgtctgctcgggatgttacagtgaccctccctgactatcccgggtccgtccctattcccctgacagtgtactgtgccaagagccaaaaccttggatattacctgtctggcaccaccgctgatgccggcaattccatcttcacaaacacggcgagcttttccccggcccagggggttggagtgcagctcacccgcaacggcacaattatccctgctaataacaccgtctctctgggggccgtgggaacaagcgctgtctccctgggcctcaccgccaattatgccagaacagggggacaggtgacggctggcaacgttcaaagcattatcggcgtgaccttcgtctaccagcccggggacggaaatgcggatgtgaccattacagttaacggcaaagtggtcgccaagtgatgatgaggactagtccctgttcccagagcccacttttttttctttttttgaaataaaatagcctgtctttcagatctcaaaggctcttttcagagccaccaaaaaaaaaaaaaaaaaaaaaaaaaaaaaaaaaaaaaaaaaaaaaaaaaaaaaaaaaaaaaaaaaaaaaaaaaaaaaaaaaaaaaaaaaaaaaaaaaaaaa

SEQ ID NO: 956 - RNA, 1259 nt, synthetic construct
  misc_feature 1..1259: note Artificial____HsIgE(1-18)_Ec(J96)-FimH(22-300)_Linker-(G4S) 3_Ec(J96)-FimC(135-148) mRNA opt5
  source 1..1259: mol_type = other RNA
aggagagtcccgcagtcggcgtccagcggctctgcttgttcgtgtgtgtgtcgttgcaggccttattcaagcttaccatggactggacctggatcctgttcctcgtggccgctgccacaagagtccacagctttgcgtgcaagacggctaacggcaccgccattcccatcgggggaggctccgccaatgtttacgtgaacctggctcctgtggtcaatgtggggcagaaccttgttgtggatctgtctacacaaattttctgtcataatgactatccggagaccatcacagattacgtcaccctccagcggggaagcgcctatggcggggtgctgtccaacttttctggaacagttaaatacagcggctcctcttatcccttccctaccacgagcgaaacaccccgcgtggtctacaattccagaaccgacaagccttggcccgtggctctttatctgacccctgtgagctctgccggcggggtcgcgattaaagccggatccctcatcgctgttctgatcctgcggcagacaaacaattacaacagcgatgactttcagttcgtgtggaatatttacgccaacaatgatgtggtcgtgccgaccggcgggtgcgacgtttctgctcgcgatgtgacggtcacactccccgactatcctggatccgtgcccatccctctgaccgtttactgtgccaagagccaaaaccttggctattacctgtctgggacaaccgcggatgccggaaattccatttttaccaacacagctagcttctcccccgcccagggcgtgggcgtccagctcacgagaaacgggaccatcattccggctaataacacagtgtctctgggagccgtcggcaccagcgccgtgtcccttgggctgacagctaattatgcgcggaccggaggccaggttacggccgggaacgtgcaaagcatcattggagtcacatttgtgtaccagggcggcgggggatctggcgggggaggctccgggggcggaggcagcaccgagaataccctccagctggctatcatctctcgcattaaatgatgatgaggactagtccctgttcccagagcccacttttttttctttttttgaaataaaatagcctgtctttcagatctcaaaggctcttttcagagccaccaaaaaaaaaaaaaaaaaaaaaaaaaaaaaaaaaaaaaaaaaaaaaaaaaaaaaaaaaaaaaaaaaaaaaaaaaaaaaaaaaaaaaaaaaaaaaaaaaaaaa

SEQ ID NO: 957 - RNA, 1682 nt, synthetic construct
  misc_feature 1..1682: note Artificial____LumSynth(1-154_C37A_N102D)_Linker(GGS)4-GGG_E c(J96)-FimH(22-300)_Linker-PGDGN_Ec(J96)-FimG(24-37) mRNA opt5
  source 1..1682: mol_type = other RNA
aggagagtcccgcagtcggcgtccagcggctctgcttgttcgtgtgtgtgtcgttgcaggccttattcaagcttaccatgcagatctacgagggcaagctgaccgccgaagggctcagattcggaattgtggctagccggtttaaccacgccctggtcgaccgccttgttgagggcgcgatcgatgctattgtgagacatgggggacgggaagaggacatcacactggtgcgcgtccccggctcctgggaaattcctgtggccgccggggagctcgctagaaaagaggatatcgacgccgttatcgctattggagtgctgatccggggcgccacgccgcacttcgattatattgcgtctgaagtcagcaagggccttgccgacctgtccctcgagctgcgcaaacccatcacctttggggtgattacagctgataccctggaacaagccatcgagagagctggaacaaagcatggcaataaagggtgggaggccgcgctctctgccattgaaatggctaacctgttcaagagccttcggggaggctccgggggatctggcggcagcgggggatccggcgggggatttgcctgcaagaccgctaatggcacagccatccctatcgggggaggcagcgccaacgtttacgtgaatctggctcccgtcgtgaacgtgggccagaatctcgtcgttgacctgtctacccagattttctgtcacaacgattatcctgagacgatcaccgactacgtgacacttcagcgcgggtccgcgtatggaggcgtgctgagcaatttttctgggaccgtcaaatactccggaagctcttatcccttccctacaacctccgaaacgccgagagtggtttacaacagccggacagataagccctggcctgtggccctctacctgacccccgtctcctctgctggcggggtggccattaaagccggcagcctgatcgctgttctcattctgcgccaaacaaataactataattccgacgattttcagttcgtgtggaacatctacgccaataacgacgtcgtggtccctaccggaggctgcgacgtgagcgcgagagatgttaccgtgacacttcccgactatccggggtctgtccctatccccctgacggtgtactgtgctaagtcccagaacctcggatattacctgagcggcaccacagccgatgccggaaattctatttttaccaacacagctagcttctcccctgcccagggggttggcgtgcaacttacccggaatgggacgatcattcccgctaacaatacagtctctctgggcgccgtgggaaccagcgcggtgtccctcggcctgaccgccaactatgctcgcacagggggacaggttaccgccggcaatgtccagagcatcattggggtgacatttgtgtaccagcccggagacggcaacgctgatgtcacgatcaccgtgaatgggaaagttgtggccaagtgatgatgaggactagtccctgttcccagagcccacttttttttctttttttgaaataaaatagcctgtctttcagatctcaaaggctcttttcagagccaccaaaaaaaaaaaaaaaaaaaaaaaaaaaaaaaaaaaaaaaaaaaaaaaaaaaaaaaaaaaaaaaaaaaaaaaaaaaaaaaaaaaaaaaaaaaaaaaaaaaaa

SEQ ID NO: 958 - RNA, 1700 nt, synthetic construct
  misc_feature 1..1700: note Artificial____HsIgE(1-18)_Ec(J96)-FimH(22-300)_Linker-PGDGN _Ec(J96)-FimG(24-37)_Linker-SGG_LumSynth(1-154_C37A_N102D) mRNA opt5
  source 1..1700: mol_type = other RNA
aggagagtcccgcagtcggcgtccagcggctctgcttgttcgtgtgtgtgtcgttgcaggccttattcaagcttaccatggactggacctggatcctgttcctcgtggccgctgccacaagagtccacagctttgcgtgcaagacggctaacggcaccgccattcccatcgggggaggctccgccaatgtttacgtgaacctggctcctgtggtcaatgtggggcagaaccttgttgtggatctgtctacacaaattttctgtcataatgactatccggagaccatcacagattacgtcaccctccagcggggaagcgcctatggcggggtgctgtccaacttttctggaacagttaaatacagcggctcctcttatcccttccctaccacgagcgaaacaccccgcgtggtctacaattccagaaccgacaagccttggcccgtggctctttatctgacccctgtgagctctgccggcggggtcgcgattaaagccggatccctcatcgctgttctgatcctgcggcagacaaacaattacaacagcgatgactttcagttcgtgtggaatatttacgccaacaatgatgtggtcgtgccgaccggcgggtgcgacgtttctgctcgcgatgtgacggtcacactccccgactatcctggatccgtgcccatccctctgaccgtttactgtgccaagagccaaaaccttggctattacctgtctgggacaaccgcggatgccggaaattccatttttaccaacacagctagcttctcccccgcccagggcgtgggcgtccagctcacgagaaacgggaccatcattccggctaataacacagtgtctctgggagccgtcggcaccagcgccgtgtcccttgggctgacagctaattatgcgcggaccggaggccaggttacggccgggaacgtgcaaagcatcattggagtcacatttgtgtaccagcctggcgacggcaatgctgatgttaccatcaccgtgaacgggaaagtcgtggccaagtctggaggcatgcagatctatgaggggaagctcacagccgaaggactgcgcttcggcattgtggcttccagatttaatcacgccctggttgaccggctcgtcgagggggcgatcgacgctattgtgcgccatggcggaagagaagaggatatcaccctggtgcgggtccccggcagctgggagattcctgtggccgccggggaacttgctcgcaaagaggacatcgatgccgttatcgctattggagtgctgatcagaggcgccacaccccacttcgactacattgcgtctgaagtcagcaaggggctcgccgatctgtcccttgagctgcggaaacccatcacgtttggagtgattaccgctgacacactcgagcaggccatcgaacgcgctggcaccaagcatgggaacaaaggctgggaggccgcgctgtctgccatcgaaatggctaatctgttcaagagcctcagatgatgatgaggactagtccctgttcccagagcccacttttttttctttttttgaaataaaatagcctgtctttcagatctcaaaggctcttttcagagccaccaaaaaaaaaaaaaaaaaaaaaaaaaaaaaaaaaaaaaaaaaaaaaaaaaaaaaaaaaaaaaaaaaaaaaaaaaaaaaaaaaaaaaaaaaaaaaaaaaaaaa

SEQ ID NO: 959 - RNA, 1727 nt, synthetic construct
  misc_feature 1..1727: note Artificial____HsIgE(1-18)_Ec(J96)-FimH(22-300)_Linker-PGDGN _Ec(J96)-FimG(24-37)_Linker-SGG_Ferritin(5-167_N19Q) mRNA opt5
  source 1..1727: mol_type = other RNA
aggagagtcccgcagtcggcgtccagcggctctgcttgttcgtgtgtgtgtcgttgcaggccttattcaagcttaccatggactggacctggatcctgttcctcgtggccgctgccacaagagtccacagctttgcgtgcaagacggctaacggcaccgccattcccatcgggggaggctccgccaatgtttacgtgaacctggctcctgtggtcaatgtggggcagaaccttgttgtggatctgtctacacaaattttctgtcataatgactatccggagaccatcacagattacgtcaccctccagcggggaagcgcctatggcggggtgctgtccaacttttctggaacagttaaatacagcggctcctcttatcccttccctaccacgagcgaaacaccccgcgtggtctacaattccagaaccgacaagccttggcccgtggctctttatctgacccctgtgagctctgccggcggggtcgcgattaaagccggatccctcatcgctgttctgatcctgcggcagacaaacaattacaacagcgatgactttcagttcgtgtggaatatttacgccaacaatgatgtggtcgtgccgaccggcgggtgcgacgtttctgctcgcgatgtgacggtcacactccccgactatcctggatccgtgcccatccctctgaccgtttactgtgccaagagccaaaaccttggctattacctgtctgggacaaccgcggatgccggaaattccatttttaccaacacagctagcttctcccccgcccagggcgtgggcgtccagctcacgagaaacgggaccatcattccggctaataacacagtgtctctgggagccgtcggcaccagcgccgtgtcccttgggctgacagctaattatgcgcggaccggaggccaggttacggccgggaacgtgcaaagcatcattggagtcacatttgtgtaccagcctggcgacggcaatgctgatgttaccatcaccgtgaacgggaaagtcgtggccaagtctggaggcgacatcattaagctcctgaatgaacaggtgaacaaagagatgcagtccagcaatctgtatatgtctatgagctcctggtgctacacacactctctcgacggggccggactgttcctttttgatcatgctgccgaggaatacgagcacgcgaagaaactgatcattttcctcaacgagaataacgttcccgtccaactgaccagcatctccgctcctgaacataagtttgagggccttacacagattttccagaaagcctatgaacacgagcaacacatcagcgagtctatcaataacattgtggaccatgccatcaagtccaaggatcacgctacgttcaattttctgcagtggtacgtggccgaacagcatgaggaagaggtcctcttcaaagacattctggataagatcgaactgattgggaacgagaaccacggcctctatctggctgaccagtacgtgaaaggaatcgccaagagccgcaaatcttgatgatgaggactagtccctgttcccagagcccacttttttttctttttttgaaataaaatagcctgtctttcagatctcaaaggctcttttcagagccaccaaaaaaaaaaaaaaaaaaaaaaaaaaaaaaaaaaaaaaaaaaaaaaaaaaaaaaaaaaaaaaaaaaaaaaaaaaaaaaaaaaaaaaaaaaaaaaaaaaaaa

SEQ ID NO: 960 - RNA, 1757 nt, synthetic construct
  misc_feature 1..1757: note Artificial____MmIgK(1-20)_Ec(J96)-FimH(22-300)_Linker-PGDGN _Ec(J96)-FimG(24-37)_Linker-(GGS)4_Ferritin(5-166) mRNA opt5
  source 1..1757: mol_type = other RNA
aggagagtcccgcagtcggcgtccagcggctctgcttgttcgtgtgtgtgtcgttgcaggccttattcaagcttaccatggagaccgacacactgctcctgtgggtgcttctgctctgggtccccggcagcacggggttcgcctgcaagaccgctaacggaacagccatccctattggcgggggatccgcgaatgtttacgtgaacctggctccggtggtcaatgtgggccagaaccttgttgtggatctgtctacccaaatcttttgtcacaatgactatcccgaaacaattaccgattacgtcacactccagagagggagcgcctatggaggcgtgctgtccaacttctctggcaccgttaaatacagcgggtcctcttatccttttcccacgaccagcgagacacctcgggtggtctacaattcccgcaccgacaagccctggcctgtggccctgtatctcacaccggtgagctctgctggaggcgtcgccatcaaagctgggtccctgattgccgttcttatcctgagacagaccaacaattacaacagcgatgacttccagtttgtgtggaatatctacgcgaacaatgatgtggtcgtgcccacgggaggctgcgacgtttctgcccgggatgtgacagtcaccctccctgactatcccgggtccgtgcctattcccctgacagtttactgtgctaagagccaaaaccttggatattacctgtctggcaccaccgccgatgctggcaattccatcttcacaaacacggccagcttttccccggcgcagggggtgggagtccagctcacccgcaacggcacaattatccctgccaataacaccgtgtctctgggggctgtcggaacaagcgccgtgtccctgggcctcaccgctaattatgccagaacagggggacaggttacggccggcaacgtgcaaagcattatcggcgtcaccttcgtgtaccagcccggggacggaaatgctgatgttaccattacagtgaacggcaaagtcgtggcgaaagggggatctggcgggtccggcggaagcggcgggtctgacatcatcaagctgcttaatgaacaggtgaacaaggagatgaatagctccaacctgtatatgtctatgagctcctggtgctacacccatagcctcgacggagccggcctgtttcttttcgatcacgctgccgaagagtacgagcatgccaagaaactgattatctttctcaatgaaaacaatgttcctgtccagctgacatctatttccgctcccgagcacaagttcgaagggctgacgcaaatctttcagaaagcctatgagcatgagcagcacattagcgaatctatcaacaatatcgtggaccacgcgattaagtccaaggatcatgctaccttcaacttcctccaatggtacgtggccgagcagcacgaagaggaagtcctgtttaaagacatccttgataagattgagctgatcggaaacgagaatcatggcctctatctggccgaccagtacgtgaaagggattgctaagagccggaaatgatgatgaggactagtccctgttcccagagcccacttttttttctttttttgaaataaaatagcctgtctttcagatctcaaaggctcttttcagagccaccaaaaaaaaaaaaaaaaaaaaaaaaaaaaaaaaaaaaaaaaaaaaaaaaaaaaaaaaaaaaaaaaaaaaaaaaaaaaaaaaaaaaaaaaaaaaaaaaaaaaa

SEQ ID NO: 961 - RNA, 1400 nt, synthetic construct
  misc_feature 1..1400: note Artificial____HsIgE(1-18)_Ec(J96)-FimH(22-300)_Linker-PGDGN _Ec(J96)-FimG(24-37)_TMdomain-HA(510-566) mRNA opt5
  source 1..1400: mol_type = other RNA
aggagagtcccgcagtcggcgtccagcggctctgcttgttcgtgtgtgtgtcgttgcaggccttattcaagcttaccatggactggacctggatcctgttcctcgtggccgctgccacaagagtccacagctttgcgtgcaagacggctaacggcaccgccattcccatcgggggaggctccgccaatgtttacgtgaacctggctcctgtggtcaatgtggggcagaaccttgttgtggatctgtctacacaaattttctgtcataatgactatccggagaccatcacagattacgtcaccctccagcggggaagcgcctatggcggggtgctgtccaacttttctggaacagttaaatacagcggctcctcttatcccttccctaccacgagcgaaacaccccgcgtggtctacaattccagaaccgacaagccttggcccgtggctctttatctgacccctgtgagctctgccggcggggtcgcgattaaagccggatccctcatcgctgttctgatcctgcggcagacaaacaattacaacagcgatgactttcagttcgtgtggaatatttacgccaacaatgatgtggtcgtgccgaccggcgggtgcgacgtttctgctcgcgatgtgacggtcacactccccgactatcctggatccgtgcccatccctctgaccgtttactgtgccaagagccaaaaccttggctattacctgtctgggacaaccgcggatgccggaaattccatttttaccaacacagctagcttctcccccgcccagggcgtgggcgtccagctcacgagaaacgggaccatcattccggctaataacacagtgtctctgggagccgtcggcaccagcgccgtgtcccttgggctgacagctaattatgcgcggaccggaggccaggttacggccgggaacgtgcaaagcatcattggagtcacatttgtgtaccagcctggcgacggcaatgctgatgttaccatcaccgtgaacgggaaagtcgtggccaaggccaagctcaatcgcgaggaaatcgacggagtgaaactggagtctacaagaatttatcagatcctggctatttactccaccgttgccagctctctcgtcctggtggtgagccttggcgcgatctccttctggatgtgctctaacgggagcctgcagtgtcggatttgcatctgatgatgaggactagtccctgttcccagagcccacttttttttctttttttgaaataaaatagcctgtctttcagatctcaaaggctcttttcagagccaccaaaaaaaaaaaaaaaaaaaaaaaaaaaaaaaaaaaaaaaaaaaaaaaaaaaaaaaaaaaaaaaaaaaaaaaaaaaaaaaaaaaaaaaaaaaaaaaaaaaaa

SEQ ID NO: 962 - RNA, 1733 nt, synthetic construct
  misc_feature 1..1733: note Artificial____HsIgE(1-18)_LumSynth(1-154_C37A_N102D)_Linker (GGS)4-GGG_Ec(J96)-FimH(22-300)_Linker-PGDGN_Ec(J96)-FimG(2 4-37) mRNA opt5
  source 1..1733: mol_type = other RNA
aggagagtcccgcagtcggcgtccagcggctctgcttgttcgtgtgtgtgtcgttgcaggccttattcaagcttaccatggactggacctggatcctgttcctcgtggccgctgccacaagagtccacagccagatttacgagggcaagctgacggcggaagggcttcggtttggaatcgttgcttcccgcttcaaccatgccctggtggatagactcgtggagggcgccattgacgctatcgtccggcacgggggacgcgaagaggatattaccctggtgagagttcccggctcttgggaaatccctgtggccgctggggagcttgcccggaaagaggacatcgatgcggtcattgccatcggagtgctgattcgcggcgctacaccgcattttgactatatcgccagcgaagtttccaagggcctcgctgatctgtctctggagctcagaaaacccattaccttcggggtgatcacagccgacaccctggaacaagcgattgagcgggccggaacaaagcacggcaataaagggtgggaggctgcccttagcgctatcgaaatggccaacctgtttaagtccctccgcggaggctctgggggaagcggcggctccgggggaagcggcgggggattcgcctgcaagaccgctaatggcacggcgatccctattgggggaggctctgccaacgtctacgtgaatctggctcccgtggtcaacgttggccagaatcttgtggtggatctgtccacccagatcttttgtcataacgactatcctgagacaattaccgattacgtcacactccagagagggagcgcctatggaggcgtgctgtctaatttctccgggaccgttaaatacagcggatcttcctatccctttcctacgacaagcgaaaccccgcgggtggtctacaactcccgcacagacaagccctggcctgtggccctgtacctcacccccgtttctagcgctggcggggtggccatcaaagcgggctccctgattgctgtccttatcctgagacaaaccaataactataatagcgatgacttccagtttgtgtggaacatctacgccaataacgacgtcgtggttcctacaggaggctgcgatgtgtctgcccgggacgtcacggtgaccctccccgattatccggggtccgttcctattcccctgacagtgtactgtgctaagagccagaaccttggatattacctgtctggcaccacagccgacgctgggaatagcatcttcaccaacacggcctccttttctcctgcgcagggagtcggcgtgcaactcacacgcaatgggaccattatccccgccaacaataccgtgagcctgggcgctgttggaacatccgccgtcagcctgggcctcaccgctaactatgccagaacagggggacaggtgacggcgggcaatgtgcagtctattatcggggtcaccttcgtgtaccagcccggagatggcaacgccgacgttacaatcaccgtgaatgggaaagtcgtggctaagtgatgatgaggactagtccctgttcccagagcccacttttttttctttttttgaaataaaatagcctgtctttcagatctcaaaggctcttttcagagccaccaaaaaaaaaaaaaaaaaaaaaaaaaaaaaaaaaaaaaaaaaaaaaaaaaaaaaaaaaaaaaaaaaaaaaaaaaaaaaaaaaaaaaaaaaaaaaaaaaaaaa

SEQ ID NO: 963 - RNA, 1700 nt, synthetic construct
  misc_feature 1..1700: note Artificial____HsIgE(1-18)_Ec(J96)-FimH(22-300_N28S_N91S_N24 9Q)_Linker-PGDGN_Ec(J96)-FimG(24-37)_Linker-SGG_LumSynth(1- 154_C37A_N102D) mRNA opt5
  source 1..1700: mol_type = other RNA
aggagagtcccgcagtcggcgtccagcggctctgcttgttcgtgtgtgtgtcgttgcaggccttattcaagcttaccatggactggacctggatcctgttcctcgtggccgctgccacaagagtccacagctttgcgtgcaagacggcttccggcaccgccattcccatcgggggaggctctgccaacgtttacgtgaatctggctcctgtggtcaacgtggggcagaatcttgttgtggatctgagcacacaaattttctgtcataacgactatccggagaccatcacagattacgtcaccctccagcggggatccgcctatggcggggtgctgtctagcttttccggaacagttaaatactctggcagctcctatcccttccctaccacgagcgaaacaccccgcgtggtctacaattctagaaccgacaagccttggcccgtggctctttatctgacccctgtgtccagcgccggcggggtcgcgattaaagccggatctctcatcgctgttctgatcctgcggcagacaaacaattacaactccgatgactttcagttcgtgtggaatatttacgccaacaatgatgtggtcgtgccgaccggcgggtgcgacgttagcgctcgcgatgtgacggtcacactccccgactatcctggatctgtgcccatccctctgaccgtttactgtgccaagtcccaaaaccttggctattacctgagcgggacaaccgcggatgccggaaattccatttttaccaacacagcttctttcagccccgcccagggcgtgggcgtccagctcacgagacaggggaccatcattccggctaataacacagtgtccctgggagccgtcggcaccagcgccgtgtctcttgggctgacagctaactatgcgcggaccggaggccaagttacggccgggaatgtgcagtccatcattggagtcacatttgtgtaccagcctggcgacggcaacgctgatgttaccatcaccgtgaatgggaaagtcgtggccaagagcggaggcatgcagatctatgaggggaagctcacagccgaaggactgcgcttcggcattgtggcttctagatttaaccacgccctggttgaccggctcgtcgagggggcgatcgacgctattgtgcgccatggcggaagagaagaggatatcaccctggtgcgggtccccggcagctgggagattcctgtggccgccggggaacttgctcgcaaagaggacatcgatgccgttatcgctattggagtgctgatcagaggcgccacaccccacttcgactacattgcgtccgaagtctctaaggggctcgccgatctgagccttgagctgcggaaacccatcacgtttggagtgattaccgctgacacactcgagcaagccatcgaacgcgctggcaccaagcatgggaataaaggctgggaggccgcgctgtccgccatcgaaatggctaacctgttcaagagcctcagatgatgatgaggactagtccctgttcccagagcccacttttttttctttttttgaaataaaatagcctgtctttcagatctcaaaggctcttttcagagccaccaaaaaaaaaaaaaaaaaaaaaaaaaaaaaaaaaaaaaaaaaaaaaaaaaaaaaaaaaaaaaaaaaaaaaaaaaaaaaaaaaaaaaaaaaaaaaaaaaaaaa

SEQ ID NO: 964 - RNA, 1700 nt, synthetic construct
  misc_feature 1..1700: note Artificial____HsIgE(1-18)_Ec(J96)-FimH(22-300_N28S_N91S_N24 9Q_N256D)_Linker-PGDGN_Ec(J96)-FimG(24-37)_Linker-SGG_LumSy nth(1-154_C37A_N102D) mRNA opt5
  source 1..1700: mol_type = other RNA
aggagagtcccgcagtcggcgtccagcggctctgcttgttcgtgtgtgtgtcgttgcaggccttattcaagcttaccatggactggacctggatcctgttcctcgtggccgctgccacaagagtccacagctttgcgtgcaagacggcttccggcaccgccattcccatcgggggaggctctgccaacgtttacgtgaatctggctcctgtggtcaacgtggggcagaatcttgttgtggatctgagcacacaaattttctgtcataacgactatccggagaccatcacagattacgtcaccctccagcggggatccgcctatggcggggtgctgtctagcttttccggaacagttaaatactctggcagctcctatcccttccctaccacgagcgaaacaccccgcgtggtctacaattctagaaccgacaagccttggcccgtggctctttatctgacccctgtgtccagcgccggcggggtcgcgattaaagccggatctctcatcgctgttctgatcctgcggcagacaaacaattacaactccgatgactttcagttcgtgtggaatatttacgccaacaatgatgtggtcgtgccgaccggcgggtgcgacgttagcgctcgcgatgtgacggtcacactccccgactatcctggatctgtgcccatccctctgaccgtttactgtgccaagtcccaaaaccttggctattacctgagcgggacaaccgcggatgccggaaattccatttttaccaacacagcttctttcagccccgcccagggcgtgggcgtccagctcacgagacaggggaccatcattccggctgacaatacagtgtccctgggagccgtcggcaccagcgccgtgtctcttgggctgacagctaactatgcgcggaccggaggccaagttacggccgggaacgtgcagtccatcattggagtcacatttgtgtaccagcctggcgatggcaatgctgacgttaccatcaccgtgaacgggaaagtcgtggccaagagcggaggcatgcagatctatgaggggaagctcacagccgaaggactgcgcttcggcattgtggcttctagatttaatcacgccctggttgaccggctcgtcgagggggcgatcgatgctattgtgcgccatggcggaagagaagaggacatcaccctggtgcgggtccccggcagctgggagattcctgtggccgccggggaacttgctcgcaaagaggatatcgacgccgttatcgctattggagtgctgatcagaggcgccacaccccacttcgattacattgcgtccgaagtctctaaggggctcgccgacctgagccttgagctgcggaaacccatcacgtttggagtgattaccgctgatacactcgagcaagccatcgaacgcgctggcaccaagcatgggaacaaaggctgggaggccgcgctgtccgccatcgaaatggctaatctgttcaagagcctcagatgatgatgaggactagtccctgttcccagagcccacttttttttctttttttgaaataaaatagcctgtctttcagatctcaaaggctcttttcagagccaccaaaaaaaaaaaaaaaaaaaaaaaaaaaaaaaaaaaaaaaaaaaaaaaaaaaaaaaaaaaaaaaaaaaaaaaaaaaaaaaaaaaaaaaaaaaaaaaaaaaaa

SEQ ID NO: 965 - RNA, 1700 nt, synthetic construct
  misc_feature 1..1700: note Artificial____HsIgE(1-18)_Ec(J96)-FimH(22-300_N28S_V48C_L55 C_N91S_N249Q)_Linker-PGDGN_Ec(J96)-FimG(24-37)_Linker-SGG_L umSynth(1-154_C37A_N102D) mRNA opt5
  source 1..1700: mol_type = other RNA
aggagagtcccgcagtcggcgtccagcggctctgcttgttcgtgtgtgtgtcgttgcaggccttattcaagcttaccatggactggacctggatcctgttcctcgtggccgctgccacaagagtccacagctttgcgtgcaagacggcttccggcaccgccattcccatcgggggaggctctgccaacgtttacgtgaatctggctccttgtgtgaacgtcgggcagaattgcgtggttgatcttagcacacaaattttctgtcataacgactatccggagaccatcacagattacgtgaccctgcagcggggatccgcctatggcggggtcctctctagcttttccggaacagtgaaatactctggcagctcctatcccttccctaccacgagcgaaacaccccgcgttgtgtacaattctagaaccgacaagccttggcccgtcgctctgtatcttacccctgtgtccagcgccggcggggtggcgattaaagccggatctctgatcgctgtcctcatcctgcggcagacaaacaattacaactccgatgactttcagttcgtttggaatatttacgccaacaatgatgtggtggtcccgaccggcgggtgcgacgtgagcgctcgcgatgttacggtgacactgcccgactatcctggatctgtccccatccctctcaccgtgtactgtgccaagtcccaaaacctgggctattaccttagcgggacaaccgcggatgccggaaattccatttttaccaacacagcttctttcagccccgcccagggcgttggcgtgcagctgacgagacaggggaccatcattccggctaataacacagtctccctcggagccgtgggcaccagcgccgtctctctggggcttacagctaactatgcgcggaccggaggccaagtgacggccgggaatgttcagtccatcattggagtgacatttgtctaccagcctggcgacggcaacgctgatgtgaccatcaccgttaatgggaaagtggtcgccaagagcggaggcatgcagatctatgaggggaagctgacagccgaaggactccgcttcggcattgtggcttctagatttaaccacgccctggtggaccggctggttgagggggcgatcgacgctattgtccgccatggcggaagagaagaggatatcaccctcgtgcgggtgcccggcagctgggagattcctgtcgccgccggggaactggctcgcaaagaggacatcgatgccgtgatcgctattggagttcttatcagaggcgccacaccccacttcgactacattgcgtccgaagtgtctaaggggctggccgatctcagcctggagcttcggaaacccatcacgtttggagtcattaccgctgacacactggagcaagccatcgaacgcgctggcaccaagcatgggaataaaggctgggaggccgcgctctccgccatcgaaatggctaacctgttcaagagcctgagatgatgatgaggactagtccctgttcccagagcccacttttttttctttttttgaaataaaatagcctgtctttcagatctcaaaggctcttttcagagccaccaaaaaaaaaaaaaaaaaaaaaaaaaaaaaaaaaaaaaaaaaaaaaaaaaaaaaaaaaaaaaaaaaaaaaaaaaaaaaaaaaaaaaaaaaaaaaaaaaaaaa

SEQ ID NO: 966 - RNA, 1700 nt, synthetic construct
  misc_feature 1..1700: note Artificial____HsIgE(1-18)_Ec(J96)-FimH(22-300_F165V)_Linker -PGDGN_Ec(J96)-FimG(24-37)_Linker-SGG_LumSynth(1-154_C37A_N 102D) mRNA opt5
  source 1..1700: mol_type = other RNA
aggagagtcccgcagtcggcgtccagcggctctgcttgttcgtgtgtgtgtcgttgcaggccttattcaagcttaccatggactggacctggatcctgttcctcgtggccgctgccacaagagtccacagctttgcgtgcaagacggctaacggcaccgccattcccatcgggggaggctccgccaatgtttacgtgaacctggctcctgtggtcaatgtggggcagaaccttgttgtggatctgtctacacaaattttctgtcataatgactatccggagaccatcacagattacgtcaccctccagcggggaagcgcctatggcggggtgctgtccaacttttctggaacagttaaatacagcggctcctcttatcccttccctaccacgagcgaaacaccccgcgtggtctacaattccagaaccgacaagccttggcccgtggctctttatctgacccctgtgagctctgccggcggggtcgcgattaaagccggatccctcatcgctgttctgatcctgcggcagacaaacaattacaacagcgatgactttcaggtggtgtggaatatttacgccaacaatgatgtcgtggttccgaccggcgggtgcgacgtgtctgctcgcgatgtcacggtgacactccccgactatcctggatccgttcccatccctctgaccgtgtactgtgccaagagccaaaaccttggctattacctgtctgggacaaccgcggatgccggaaattccattttcaccaacacagctagcttttcccccgcccagggcgtcggcgtgcagctcacgagaaacgggaccatcattccggctaataacacagtctctctgggagccgtgggcaccagcgccgtttcccttgggctgacagctaattatgcgcggaccggaggccaggtgacggccgggaacgtccaaagcatcattggagtgacattcgtttaccagcctggcgacggcaatgctgatgtgaccatcaccgtcaacgggaaagtggtggccaagtctggaggcatgcagatctatgaggggaagctcacagccgaaggactgcgctttggcattgttgcttccagattcaatcacgccctggtcgaccggctcgtggagggggcgatcgacgctattgtgcgccatggcggaagagaagaggatatcaccctggtccgggtgcccggcagctgggagattcctgttgccgccggggaacttgctcgcaaagaggacatcgatgccgtgatcgctattggagtcctgatcagaggcgccacaccccactttgactacattgcgtctgaagtgagcaaggggctcgccgatctgtcccttgagctgcggaaacccatcacgttcggagttattaccgctgacacactcgagcaggccatcgaacgcgctggcaccaagcatgggaacaaaggctgggaggccgcgctgtctgccatcgaaatggctaatctgtttaagagcctcagatgatgatgaggactagtccctgttcccagagcccacttttttttctttttttgaaataaaatagcctgtctttcagatctcaaaggctcttttcagagccaccaaaaaaaaaaaaaaaaaaaaaaaaaaaaaaaaaaaaaaaaaaaaaaaaaaaaaaaaaaaaaaaaaaaaaaaaaaaaaaaaaaaaaaaaaaaaaaaaaaaaa

SEQ ID NO: 967 - RNA, 1727 nt, synthetic construct
  misc_feature 1..1727: note Artificial____HsIgE(1-18)_Ec(J96)-FimH(22-300_N28S_N91S_N24 9Q)_Linker-PGDGN_Ec(J96)-FimG(24-37)_Linker-SGG_Ferritin(5- 167_N19Q) mRNA opt5
  source 1..1727: mol_type = other RNA
aggagagtcccgcagtcggcgtccagcggctctgcttgttcgtgtgtgtgtcgttgcaggccttattcaagcttaccatggactggacctggatcctgttcctcgtggccgctgccacaagagtccacagctttgcgtgcaagacggcttccggcaccgccattcccatcgggggaggctctgccaacgtttacgtgaatctggctcctgtggtcaacgtggggcagaatcttgttgtggatctgagcacacaaattttctgtcataacgactatccggagaccatcacagattacgtcaccctccagcggggatccgcctatggcggggtgctgtctagcttttccggaacagttaaatactctggcagctcctatcccttccctaccacgagcgaaacaccccgcgtggtctacaattctagaaccgacaagccttggcccgtggctctttatctgacccctgtgtccagcgccggcggggtcgcgattaaagccggatctctcatcgctgttctgatcctgcggcagacaaacaattacaactccgatgactttcagttcgtgtggaatatttacgccaacaatgatgtggtcgtgccgaccggcgggtgcgacgttagcgctcgcgatgtgacggtcacactccccgactatcctggatctgtgcccatccctctgaccgtttactgtgccaagtcccaaaaccttggctattacctgagcgggacaaccgcggatgccggaaattccatttttaccaacacagcttctttcagccccgcccagggcgtgggcgtccagctcacgagacaggggaccatcattccggctaataacacagtgtccctgggagccgtcggcaccagcgccgtgtctcttgggctgacagctaactatgcgcggaccggaggccaagttacggccgggaatgtgcagtccatcattggagtcacatttgtgtaccagcctggcgacggcaacgctgatgttaccatcaccgtgaatgggaaagtcgtggccaagagcggaggcgacatcattaagctcctgaacgaacaggtgaataaagagatgcaatctagcaacctgtatatgtccatgtctagctggtgctacacacactccctcgacggggccggactgttcctttttgatcatgctgccgaggaatacgagcacgcgaagaaactgatcattttcctcaatgagaacaatgttcccgtccagctgaccagcatctctgctcctgaacataagtttgagggccttacacagattttccaaaaagcctatgaacacgagcagcacatctccgagagcatcaacaatattgtggaccatgccatcaagtctaaggatcacgctacgttcaactttctgcagtggtacgtggccgaacagcatgaggaagaggtcctcttcaaagacattctggataagatcgaactgattgggaatgagaaccacggcctctatctggctgaccaatacgtgaaaggaatcgccaagtcccgcaaaagctgatgatgaggactagtccctgttcccagagcccacttttttttctttttttgaaataaaatagcctgtctttcagatctcaaaggctcttttcagagccaccaaaaaaaaaaaaaaaaaaaaaaaaaaaaaaaaaaaaaaaaaaaaaaaaaaaaaaaaaaaaaaaaaaaaaaaaaaaaaaaaaaaaaaaaaaaaaaaaaaaaa

SEQ ID NO: 968 - RNA, 1727 nt, synthetic construct
  misc_feature 1..1727: note Artificial____HsIgE(1-18)_Ec(J96)-FimH(22-300_N28S_N91S_N24 9Q_N256D)_Linker-PGDGN_Ec(J96)-FimG(24-37)_Linker-SGG_Ferri tin(5-167_N19Q) mRNA opt5
  source 1..1727: mol_type = other RNA
aggagagtcccgcagtcggcgtccagcggctctgcttgttcgtgtgtgtgtcgttgcaggccttattcaagcttaccatggactggacctggatcctgttcctcgtggccgctgccacaagagtccacagctttgcgtgcaagacggcttccggcaccgccattcccatcgggggaggctctgccaacgtttacgtgaatctggctcctgtggtcaacgtggggcagaatcttgttgtggatctgagcacacaaattttctgtcataacgactatccggagaccatcacagattacgtcaccctccagcggggatccgcctatggcggggtgctgtctagcttttccggaacagttaaatactctggcagctcctatcccttccctaccacgagcgaaacaccccgcgtggtctacaattctagaaccgacaagccttggcccgtggctctttatctgacccctgtgtccagcgccggcggggtcgcgattaaagccggatctctcatcgctgttctgatcctgcggcagacaaacaattacaactccgatgactttcagttcgtgtggaatatttacgccaacaatgatgtggtcgtgccgaccggcgggtgcgacgttagcgctcgcgatgtgacggtcacactccccgactatcctggatctgtgcccatccctctgaccgtttactgtgccaagtcccaaaaccttggctattacctgagcgggacaaccgcggatgccggaaattccatttttaccaacacagcttctttcagccccgcccagggcgtgggcgtccagctcacgagacaggggaccatcattccggctgacaatacagtgtccctgggagccgtcggcaccagcgccgtgtctcttgggctgacagctaactatgcgcggaccggaggccaagttacggccgggaacgtgcagtccatcattggagtcacatttgtgtaccagcctggcgatggcaatgctgacgttaccatcaccgtgaacgggaaagtcgtggccaagagcggaggcgacatcattaagctcctgaatgaacaggtgaacaaagagatgcaatctagcaatctgtatatgtccatgtctagctggtgctacacacactccctcgatggggccggactgttcctttttgaccatgctgccgaggaatacgagcacgcgaagaaactgatcattttcctcaacgagaataacgttcccgtccagctgaccagcatctctgctcctgaacataagtttgagggccttacacagattttccaaaaagcctatgaacacgagcagcacatctccgagagcatcaataacattgtggatcatgccatcaagtctaaggaccacgctacgttcaattttctgcagtggtacgtggccgaacagcatgaggaagaggtcctcttcaaagatattctggacaagatcgaactgattgggaacgagaatcacggcctctatctggctgatcaatacgtgaaaggaatcgccaagtcccgcaaaagctgatgatgaggactagtccctgttcccagagcccacttttttttctttttttgaaataaaatagcctgtctttcagatctcaaaggctcttttcagagccaccaaaaaaaaaaaaaaaaaaaaaaaaaaaaaaaaaaaaaaaaaaaaaaaaaaaaaaaaaaaaaaaaaaaaaaaaaaaaaaaaaaaaaaaaaaaaaaaaaaaaa

SEQ ID NO: 969 - RNA, 1727 nt, synthetic construct
  misc_feature 1..1727: note Artificial____HsIgE(1-18)_Ec(J96)-FimH(22-300_N28S_V48C_L55 C_N91S_N249Q)_Linker-PGDGN_Ec(J96)-FimG(24-37)_Linker-SGG_F erritin(5-167_N19Q) mRNA opt5
  source 1..1727: mol_type = other RNA
aggagagtcccgcagtcggcgtccagcggctctgcttgttcgtgtgtgtgtcgttgcaggccttattcaagcttaccatggactggacctggatcctgttcctcgtggccgctgccacaagagtccacagctttgcgtgcaagacggcttccggcaccgccattcccatcgggggaggctctgccaacgtttacgtgaatctggctccttgtgtgaacgtcgggcagaattgcgtggttgatcttagcacacaaattttctgtcataacgactatccggagaccatcacagattacgtgaccctgcagcggggatccgcctatggcggggtcctctctagcttttccggaacagtgaaatactctggcagctcctatcccttccctaccacgagcgaaacaccccgcgttgtgtacaattctagaaccgacaagccttggcccgtcgctctgtatcttacccctgtgtccagcgccggcggggtggcgattaaagccggatctctgatcgctgtcctcatcctgcggcagacaaacaattacaactccgatgactttcagttcgtttggaatatttacgccaacaatgatgtggtggtcccgaccggcgggtgcgacgtgagcgctcgcgatgttacggtgacactgcccgactatcctggatctgtccccatccctctcaccgtgtactgtgccaagtcccaaaacctgggctattaccttagcgggacaaccgcggatgccggaaattccatttttaccaacacagcttctttcagccccgcccagggcgttggcgtgcagctgacgagacaggggaccatcattccggctaataacacagtctccctcggagccgtgggcaccagcgccgtctctctggggcttacagctaactatgcgcggaccggaggccaagtgacggccgggaatgttcagtccatcattggagtgacatttgtctaccagcctggcgacggcaacgctgatgtgaccatcaccgttaatgggaaagtggtcgccaagagcggaggcgacatcattaagctgctcaacgaacaggtgaataaagagatgcaatctagcaacctgtatatgtccatgtctagctggtgctacacacactccctggacggggccggactcttcctgtttgatcatgctgccgaggaatacgagcacgcgaagaaacttatcattttcctgaatgagaacaatgtgcccgttcagctcaccagcatctctgctcctgaacataagtttgagggcctgacacagattttccaaaaagcctatgaacacgagcagcacatctccgagagcatcaacaatattgtcgaccatgccatcaagtctaaggatcacgctacgttcaactttcttcagtggtacgtggccgaacagcatgaggaagaggtgctgttcaaagacattctcgataagatcgaactgattgggaatgagaaccacggcctgtatctcgctgaccaatacgtcaaaggaatcgccaagtcccgcaaaagctgatgatgaggactagtccctgttcccagagcccacttttttttctttttttgaaataaaatagcctgtctttcagatctcaaaggctcttttcagagccaccaaaaaaaaaaaaaaaaaaaaaaaaaaaaaaaaaaaaaaaaaaaaaaaaaaaaaaaaaaaaaaaaaaaaaaaaaaaaaaaaaaaaaaaaaaaaaaaaaaaaa

SEQ ID NO: 970 - RNA, 1727 nt, synthetic construct
  misc_feature 1..1727: note Artificial____HsIgE(1-18)_Ec(J96)-FimH(22-300_F165V)_Linker -PGDGN_Ec(J96)-FimG(24-37)_Linker-SGG_Ferritin(5-167_N19Q) mRNA opt5
  source 1..1727: mol_type = other RNA
aggagagtcccgcagtcggcgtccagcggctctgcttgttcgtgtgtgtgtcgttgcaggccttattcaagcttaccatggactggacctggatcctgttcctcgtggccgctgccacaagagtccacagctttgcgtgcaagacggctaacggcaccgccattcccatcgggggaggctccgccaatgtttacgtgaacctggctcctgtggtcaatgtggggcagaaccttgttgtggatctgtctacacaaattttctgtcataatgactatccggagaccatcacagattacgtcaccctccagcggggaagcgcctatggcggggtgctgtccaacttttctggaacagttaaatacagcggctcctcttatcccttccctaccacgagcgaaacaccccgcgtggtctacaattccagaaccgacaagccttggcccgtggctctttatctgacccctgtgagctctgccggcggggtcgcgattaaagccggatccctcatcgctgttctgatcctgcggcagacaaacaattacaacagcgatgactttcaggtggtgtggaatatttacgccaacaatgatgtcgtggttccgaccggcgggtgcgacgtgtctgctcgcgatgtcacggtgacactccccgactatcctggatccgttcccatccctctgaccgtgtactgtgccaagagccaaaaccttggctattacctgtctgggacaaccgcggatgccggaaattccattttcaccaacacagctagcttttcccccgcccagggcgtcggcgtgcagctcacgagaaacgggaccatcattccggctaataacacagtctctctgggagccgtgggcaccagcgccgtttcccttgggctgacagctaattatgcgcggaccggaggccaggtgacggccgggaacgtccaaagcatcattggagtgacattcgtttaccagcctggcgacggcaatgctgatgtgaccatcaccgtcaacgggaaagtggtggccaagtctggaggcgacatcattaagctcctgaatgagcaggttaacaaagaaatgcagtccagcaatctgtatatgtctatgagctcctggtgctacacacactctctcgacggggccggactgtttcttttcgatcatgctgccgaggaatacgagcacgcgaagaaactgatcatttttctcaacgagaataacgtccccgtgcaactgaccagcatctccgctcctgaacataagttcgagggccttacacagatttttcagaaagcctatgaacacgagcaacacatcagcgagtctatcaataacattgtggaccatgccatcaagtccaaggatcacgctacgttcaatttcctgcagtggtacgtcgccgaacagcatgaggaagaggtgctctttaaagacattctggataagatcgaactgattgggaacgagaaccacggcctctatctggctgaccagtacgttaaaggaatcgccaagagccgcaaatcttgatgatgaggactagtccctgttcccagagcccacttttttttctttttttgaaataaaatagcctgtctttcagatctcaaaggctcttttcagagccaccaaaaaaaaaaaaaaaaaaaaaaaaaaaaaaaaaaaaaaaaaaaaaaaaaaaaaaaaaaaaaaaaaaaaaaaaaaaaaaaaaaaaaaaaaaaaaaaaaaaaa

SEQ ID NO: 971 - RNA, 974 nt, synthetic construct
  misc_feature 1..974: note Artificial____Ec(J96)-FimC(1-36)_Ec(J96)-FimC(37-241) mRNA opt1
  source 1..974: mol_type = other RNA
aggagagtcccgcagtcggcgtccagcggctctgcttgttcgtgtgtgtgtcgttgcaggccttattcaagcttaccatgagcaacaagaacgtgaacgtccgcaagtcccaggagatcaccttctgcctgctcgccggcatcctgatgttcatggccatgatggtggcggggcgggccgaggccggcgtggccctgggggccacccgcgtcatctaccccgcgggccagaagcaggtccagctcgccgtgaccaacaacgacgagaacagcacgtacctgatccagtcctgggtggagaacgccgacggggtgaaggacggccggttcatcgtgaccccgcccctgttcgccatgaaggggaagaaggagaacaccctccgcatcctggacgccaccaacaaccagctgccccaggaccgggagagcctcttctggatgaacgtcaaggcgatcccctccatggacaagagcaagctgacggagaacaccctgcagctcgccatcatctcccgcatcaagctgtactaccggccggccaagctggccctcccgcccgaccaggcggccgagaagctgcgcttccggcgcagcgccaactccctgaccctcatcaaccccaccccctactacctgacggtgaccgagctgaacgccggcacccgggtgctcgagaacgccctggtcccgcccatgggcgagagcaccgtgaagctgccctccgacgcggggagcaacatcacgtaccgcaccatcaacgactacggcgccctcacccccaagatgaccggggtgatggagtgaggactagtccctgttcccagagcccacttttttttctttttttgaaataaaatagcctgtctttcagatctaaaaaaaaaaaaaaaaaaaaaaaaaaaaaaaaaaaaaaaaaaaaaaaaaaaaaaaaaaaaaaaaaaaaaaaaaaaaaaaaaaaaaaaaaaaaaaaaaaaa

SEQ ID NO: 972 - RNA, 920 nt, synthetic construct
  misc_feature 1..920: note = Artificial____HsIgE(1-18)_Ec(J96)-FimC(37-241) mRNA opt1
  source 1..920: mol_type = other RNA
aggagagtcccgcagtcggcgtccagcggctctgcttgttcgtgtgtgtgtcgttgcaggccttattcaagcttaccatggactggacctggatcctgttcctcgtggccgccgcgacccgcgtccacagcggcgtggccctgggggccacccgcgtcatctaccccgcgggccagaagcaggtccagctcgccgtgaccaacaacgacgagaacagcacgtacctgatccagtcctgggtggagaacgccgacggggtgaaggacggccggttcatcgtgaccccgcccctgttcgccatgaaggggaagaaggagaacaccctccgcatcctggacgccaccaacaaccagctgccccaggaccgggagagcctcttctggatgaacgtcaaggcgatcccctccatggacaagagcaagctgacggagaacaccctgcagctcgccatcatctcccgcatcaagctgtactaccggccggccaagctggccctcccgcccgaccaggcggccgagaagctgcgcttccggcgcagcgccaactccctgaccctcatcaaccccaccccctactacctgacggtgaccgagctgaacgccggcacccgggtgctcgagaacgccctggtcccgcccatgggcgagagcaccgtgaagctgccctccgacgcggggagcaacatcacgtaccgcaccatcaacgactacggcgccctcacccccaagatgaccggggtgatggagtgaggactagtccctgttcccagagcccacttttttttctttttttgaaataaaatagcctgtctttcagatctaaaaaaaaaaaaaaaaaaaaaaaaaaaaaaaaaaaaaaaaaaaaaaaaaaaaaaaaaaaaaaaaaaaaaaaaaaaaaaaaaaaaaaaaaaaaaaaaaaaa

SEQ ID NO: 973 - RNA, 1151 nt, synthetic construct
  misc_feature 1..1151: note Artificial____Ec(J96)-FimH(1-21)_Ec(J96)-FimH(22-300) mRNA opt1
  source 1..1151: mol_type = other RNA
aggagagtcccgcagtcggcgtccagcggctctgcttgttcgtgtgtgtgtcgttgcaggccttattcaagcttaccatgaagcgcgtgatcaccctgttcgccgtcctcctgatgggctggagcgtgaacgcctggtccttcgcctgcaagaccgccaacggcaccgcgatccccatcgggggcgggagcgccaacgtgtacgtcaacctggccccggtggtgaacgtcggccagaacctcgtggtggacctgtccacgcagatcttctgccacaacgactaccccgagaccatcaccgactacgtcaccctgcagcgcgggagcgcctacggcggcgtgctctccaacttcagcgggacggtgaagtactccggcagctcctaccccttccccaccaccagcgagaccccgcgggtcgtgtacaactcccgcacggacaagccctggcccgtggccctgtacctgacccccgtcagctccgccgggggcgtggcgatcaaggccgggagcctcatcgccgtgctgatcctgcggcagaccaacaactacaactccgacgacttccagttcgtctggaacatctacgcgaacaacgacgtggtggtcccgaccggcggctgcgacgtgagcgcccgcgacgtgacggtcaccctccccgactaccccgggtccgtgcccatcccgctgaccgtgtactgcgccaagagccagaacctgggctactacctctccgggaccacggccgacgccggcaacagcatcttcaccaacaccgcgtccttcagccccgcccagggcgtcggggtgcagctgacccggaacggcacgatcatccccgccaacaacaccgtcagcctgggggccgtgggcacctccgccgtgagcctcgggctgaccgcgaactacgcccgcacgggcggccaggtcaccgccgggaacgtgcagtccatcatcggcgtgaccttcgtctaccagtgaggactagtccctgttcccagagcccacttttttttctttttttgaaataaaatagcctgtctttcagatctaaaaaaaaaaaaaaaaaaaaaaaaaaaaaaaaaaaaaaaaaaaaaaaaaaaaaaaaaaaaaaaaaaaaaaaaaaaaaaaaaaaaaaaaaaaaaaaaaaaa

SEQ ID NO: 974 - RNA, 1142 nt, synthetic construct
  misc_feature 1..1142: note = Artificial____HsIgE(1-18)_Ec(J96)-FimH(22-300) mRNA opt1
  source 1..1142: mol_type = other RNA
aggagagtcccgcagtcggcgtccagcggctctgcttgttcgtgtgtgtgtcgttgcaggccttattcaagcttaccatggactggacctggatcctgttcctcgtggccgccgcgacccgcgtccacagcttcgcctgcaagaccgccaacggcaccgcgatccccatcgggggcgggagcgccaacgtgtacgtcaacctggccccggtggtgaacgtcggccagaacctcgtggtggacctgtccacgcagatcttctgccacaacgactaccccgagaccatcaccgactacgtcaccctgcagcgcgggagcgcctacggcggcgtgctctccaacttcagcgggacggtgaagtactccggcagctcctaccccttccccaccaccagcgagaccccgcgggtcgtgtacaactcccgcacggacaagccctggcccgtggccctgtacctgacccccgtcagctccgccgggggcgtggcgatcaaggccgggagcctcatcgccgtgctgatcctgcggcagaccaacaactacaactccgacgacttccagttcgtctggaacatctacgcgaacaacgacgtggtggtcccgaccggcggctgcgacgtgagcgcccgcgacgtgacggtcaccctccccgactaccccgggtccgtgcccatcccgctgaccgtgtactgcgccaagagccagaacctgggctactacctctccgggaccacggccgacgccggcaacagcatcttcaccaacaccgcgtccttcagccccgcccagggcgtcggggtgcagctgacccggaacggcacgatcatccccgccaacaacaccgtcagcctgggggccgtgggcacctccgccgtgagcctcgggctgaccgcgaactacgcccgcacgggcggccaggtcaccgccgggaacgtgcagtccatcatcggcgtgaccttcgtctaccagtgaggactagtccctgttcccagagcccacttttttttctttttttgaaataaaatagcctgtctttcagatctaaaaaaaaaaaaaaaaaaaaaaaaaaaaaaaaaaaaaaaaaaaaaaaaaaaaaaaaaaaaaaaaaaaaaaaaaaaaaaaaaaaaaaaaaaaaaaaaaaaa

SEQ ID NO: 975 - RNA, 1148 nt, synthetic construct
  misc_feature 1..1148: note = Artificial____MmIgK(1-20)_Ec(J96)-FimH(22-300) mRNA opt1
  source 1..1148: mol_type = other RNA
aggagagtcccgcagtcggcgtccagcggctctgcttgttcgtgtgtgtgtcgttgcaggccttattcaagcttaccatggagaccgacaccctgctcctgtgggtgctgctcctgtgggtccccggcagcacggggttcgcctgcaagaccgccaacggcaccgcgatccccatcgggggcgggagcgccaacgtgtacgtcaacctggccccggtggtgaacgtcggccagaacctcgtggtggacctgtccacgcagatcttctgccacaacgactaccccgagaccatcaccgactacgtcaccctgcagcgcgggagcgcctacggcggcgtgctctccaacttcagcgggacggtgaagtactccggcagctcctaccccttccccaccaccagcgagaccccgcgggtcgtgtacaactcccgcacggacaagccctggcccgtggccctgtacctgacccccgtcagctccgccgggggcgtggcgatcaaggccgggagcctcatcgccgtgctgatcctgcggcagaccaacaactacaactccgacgacttccagttcgtctggaacatctacgcgaacaacgacgtggtggtcccgaccggcggctgcgacgtgagcgcccgcgacgtgacggtcaccctccccgactaccccgggtccgtgcccatcccgctgaccgtgtactgcgccaagagccagaacctgggctactacctctccgggaccacggccgacgccggcaacagcatcttcaccaacaccgcgtccttcagccccgcccagggcgtcggggtgcagctgacccggaacggcacgatcatccccgccaacaacaccgtcagcctgggggccgtgggcacctccgccgtgagcctcgggctgaccgcgaactacgcccgcacgggcggccaggtcaccgccgggaacgtgcagtccatcatcggcgtgaccttcgtctaccagtgaggactagtccctgttcccagagcccacttttttttctttttttgaaataaaatagcctgtctttcagatctaaaaaaaaaaaaaaaaaaaaaaaaaaaaaaaaaaaaaaaaaaaaaaaaaaaaaaaaaaaaaaaaaaaaaaaaaaaaaaaaaaaaaaaaaaaaaaaaaaaa

SEQ ID NO: 976 - RNA, 1208 nt, synthetic construct
  misc_feature 1..1208: note Artificial____Ec(J96)-FimH(1-21)_Ec(J96)-FimH(22-300)_Linke r-PGDGN_Ec(J96)-FimG(24-37) mRNA opt1
  source 1..1208: mol_type = other RNA
aggagagtcccgcagtcggcgtccagcggctctgcttgttcgtgtgtgtgtcgttgcaggccttattcaagcttaccatgaagcgcgtgatcaccctgttcgccgtcctcctgatgggctggagcgtgaacgcctggtccttcgcctgcaagaccgccaacggcaccgcgatccccatcgggggcgggagcgccaacgtgtacgtcaacctggccccggtggtgaacgtcggccagaacctcgtggtggacctgtccacgcagatcttctgccacaacgactaccccgagaccatcaccgactacgtcaccctgcagcgcgggagcgcctacggcggcgtgctctccaacttcagcgggacggtgaagtactccggcagctcctaccccttccccaccaccagcgagaccccgcgggtcgtgtacaactcccgcacggacaagccctggcccgtggccctgtacctgacccccgtcagctccgccgggggcgtggcgatcaaggccgggagcctcatcgccgtgctgatcctgcggcagaccaacaactacaactccgacgacttccagttcgtctggaacatctacgcgaacaacgacgtggtggtcccgaccggcggctgcgacgtgagcgcccgcgacgtgacggtcaccctccccgactaccccgggtccgtgcccatcccgctgaccgtgtactgcgccaagagccagaacctgggctactacctctccgggaccacggccgacgccggcaacagcatcttcaccaacaccgcgtccttcagccccgcccagggcgtcggggtgcagctgacccggaacggcacgatcatccccgccaacaacaccgtcagcctgggggccgtgggcacctccgccgtgagcctcgggctgaccgcgaactacgcccgcacgggcggccaggtcaccgccgggaacgtgcagtccatcatcggcgtgaccttcgtctaccagcccggcgacgggaacgccgacgtgaccatcaccgtcaacggcaaggtggtggccaagtgaggactagtccctgttcccagagcccacttttttttctttttttgaaataaaatagcctgtctttcagatctaaaaaaaaaaaaaaaaaaaaaaaaaaaaaaaaaaaaaaaaaaaaaaaaaaaaaaaaaaaaaaaaaaaaaaaaaaaaaaaaaaaaaaaaaaaaaaaaaaaa

SEQ ID NO: 977 - RNA, 1199 nt, synthetic construct
  misc_feature 1..1199: note Artificial____HsIgE(1-18)_Ec(J96)-FimH(22-300)_Linker-PGDGN _Ec(J96)-FimG(24-37) mRNA opt1
  source 1..1199: mol_type = other RNA
aggagagtcccgcagtcggcgtccagcggctctgcttgttcgtgtgtgtgtcgttgcaggccttattcaagcttaccatggactggacctggatcctgttcctcgtggccgccgcgacccgcgtccacagcttcgcctgcaagaccgccaacggcaccgcgatccccatcgggggcgggagcgccaacgtgtacgtcaacctggccccggtggtgaacgtcggccagaacctcgtggtggacctgtccacgcagatcttctgccacaacgactaccccgagaccatcaccgactacgtcaccctgcagcgcgggagcgcctacggcggcgtgctctccaacttcagcgggacggtgaagtactccggcagctcctaccccttccccaccaccagcgagaccccgcgggtcgtgtacaactcccgcacggacaagccctggcccgtggccctgtacctgacccccgtcagctccgccgggggcgtggcgatcaaggccgggagcctcatcgccgtgctgatcctgcggcagaccaacaactacaactccgacgacttccagttcgtctggaacatctacgcgaacaacgacgtggtggtcccgaccggcggctgcgacgtgagcgcccgcgacgtgacggtcaccctccccgactaccccgggtccgtgcccatcccgctgaccgtgtactgcgccaagagccagaacctgggctactacctctccgggaccacggccgacgccggcaacagcatcttcaccaacaccgcgtccttcagccccgcccagggcgtcggggtgcagctgacccggaacggcacgatcatccccgccaacaacaccgtcagcctgggggccgtgggcacctccgccgtgagcctcgggctgaccgcgaactacgcccgcacgggcggccaggtcaccgccgggaacgtgcagtccatcatcggcgtgaccttcgtctaccagcccggcgacgggaacgccgacgtgaccatcaccgtcaacggcaaggtggtggccaagtgaggactagtccctgttcccagagcccacttttttttctttttttgaaataaaatagcctgtctttcagatctaaaaaaaaaaaaaaaaaaaaaaaaaaaaaaaaaaaaaaaaaaaaaaaaaaaaaaaaaaaaaaaaaaaaaaaaaaaaaaaaaaaaaaaaaaaaaaaaaaaa

SEQ ID NO: 978 - RNA, 1205 nt, synthetic construct
  misc_feature 1..1205: note Artificial____HsIgE(1-18)_Ec(J96)-FimH(22-300)_Linker-G4SGG _Ec(J96)-FimG(24-37) mRNA opt1
  source 1..1205: mol_type = other RNA
aggagagtcccgcagtcggcgtccagcggctctgcttgttcgtgtgtgtgtcgttgcaggccttattcaagcttaccatggactggacctggatcctgttcctcgtggccgccgcgacccgcgtccacagcttcgcctgcaagaccgccaacggcaccgcgatccccatcgggggcgggagcgccaacgtgtacgtcaacctggccccggtggtgaacgtcggccagaacctcgtggtggacctgtccacgcagatcttctgccacaacgactaccccgagaccatcaccgactacgtcaccctgcagcgcgggagcgcctacggcggcgtgctctccaacttcagcgggacggtgaagtactccggcagctcctaccccttccccaccaccagcgagaccccgcgggtcgtgtacaactcccgcacggacaagccctggcccgtggccctgtacctgacccccgtcagctccgccgggggcgtggcgatcaaggccgggagcctcatcgccgtgctgatcctgcggcagaccaacaactacaactccgacgacttccagttcgtctggaacatctacgcgaacaacgacgtggtggtcccgaccggcggctgcgacgtgagcgcccgcgacgtgacggtcaccctccccgactaccccgggtccgtgcccatcccgctgaccgtgtactgcgccaagagccagaacctgggctactacctctccgggaccacggccgacgccggcaacagcatcttcaccaacaccgcgtccttcagccccgcccagggcgtcggggtgcagctgacccggaacggcacgatcatccccgccaacaacaccgtcagcctgggggccgtgggcacctccgccgtgagcctcgggctgaccgcgaactacgcccgcacgggcggccaggtcaccgccgggaacgtgcagtccatcatcggcgtgaccttcgtctaccagggcggcggcggctccggaggcgccgacgtgaccatcaccgtcaacggcaaggtggtggccaagtgaggactagtccctgttcccagagcccacttttttttctttttttgaaataaaatagcctgtctttcagatctaaaaaaaaaaaaaaaaaaaaaaaaaaaaaaaaaaaaaaaaaaaaaaaaaaaaaaaaaaaaaaaaaaaaaaaaaaaaaaaaaaaaaaaaaaaaaaaaaaaa

SEQ ID NO: 979 - RNA, 1205 nt, synthetic construct
  misc_feature 1..1205: note Artificial____MmIgK(1-20)_Ec(J96)-FimH(22-300)_Linker-PGDGN _Ec(J96)-FimG(24-37) mRNA opt1
  source 1..1205: mol_type = other RNA
aggagagtcccgcagtcggcgtccagcggctctgcttgttcgtgtgtgtgtcgttgcaggccttattcaagcttaccatggagaccgacaccctgctcctgtgggtgctgctcctgtgggtccccggcagcacggggttcgcctgcaagaccgccaacggcaccgcgatccccatcgggggcgggagcgccaacgtgtacgtcaacctggccccggtggtgaacgtcggccagaacctcgtggtggacctgtccacgcagatcttctgccacaacgactaccccgagaccatcaccgactacgtcaccctgcagcgcgggagcgcctacggcggcgtgctctccaacttcagcgggacggtgaagtactccggcagctcctaccccttccccaccaccagcgagaccccgcgggtcgtgtacaactcccgcacggacaagccctggcccgtggccctgtacctgacccccgtcagctccgccgggggcgtggcgatcaaggccgggagcctcatcgccgtgctgatcctgcggcagaccaacaactacaactccgacgacttccagttcgtctggaacatctacgcgaacaacgacgtggtggtcccgaccggcggctgcgacgtgagcgcccgcgacgtgacggtcaccctccccgactaccccgggtccgtgcccatcccgctgaccgtgtactgcgccaagagccagaacctgggctactacctctccgggaccacggccgacgccggcaacagcatcttcaccaacaccgcgtccttcagccccgcccagggcgtcggggtgcagctgacccggaacggcacgatcatccccgccaacaacaccgtcagcctgggggccgtgggcacctccgccgtgagcctcgggctgaccgcgaactacgcccgcacgggcggccaggtcaccgccgggaacgtgcagtccatcatcggcgtgaccttcgtctaccagcccggcgacgggaacgccgacgtgaccatcaccgtcaacggcaaggtggtggccaagtgaggactagtccctgttcccagagcccacttttttttctttttttgaaataaaatagcctgtctttcagatctaaaaaaaaaaaaaaaaaaaaaaaaaaaaaaaaaaaaaaaaaaaaaaaaaaaaaaaaaaaaaaaaaaaaaaaaaaaaaaaaaaaaaaaaaaaaaaaaaaaa

SEQ ID NO: 980 - RNA, 1205 nt, synthetic construct
  misc_feature 1..1205: note Artificial____MmIgK(1-20)_Ec(536)-FimH(22-300)_Linker-PGDGN _Ec(J96)-FimG(24-37) mRNA opt1
  source 1..1205: mol_type = other RNA
aggagagtcccgcagtcggcgtccagcggctctgcttgttcgtgtgtgtgtcgttgcaggccttattcaagcttaccatggagaccgacaccctgctcctgtgggtgctgctcctgtgggtccccggcagcacggggttcgcctgcaagaccgccaacggcaccgcgatccccatcgggggcgggagcgccaacgtgtacgtcaacctggccccggccgtgaacgtcggccagaacctcgtggtggacctgtccacgcagatcttctgccacaacgactaccccgagaccatcaccgactacgtcaccctgcagcgcgggagcgcctacggcggcgtgctctccagcttcagcgggacggtgaagtacaacggcagctcctaccccttccccaccaccagcgagaccccgcgggtcgtgtacaactcccgcacggacaagccctggcccgtggccctgtacctgacccccgtcagctccgccgggggcgtggcgatcaaggccgggagcctcatcgccgtgctgatcctgcggcagaccaacaactacaactccgacgacttccagttcgtctggaacatctacgcgaacaacgacgtggtggtcccgaccggcggctgcgacgtgagcgcccgcgacgtgacggtcaccctccccgactaccccgggtccgtgcccatcccgctgaccgtgtactgcgccaagagccagaacctgggctactacctctccgggaccacggccgacgccggcaacagcatcttcaccaacaccgcgtccttcagccccgcccagggcgtcggggtgcagctgacccggaacggcacgatcatccccgccaacaacaccgtcagcctgggggccgtgggcacctccgccgtgagcctcgggctgaccgcgaactacgcccgcacgggcggccaggtcaccgccgggaacgtgcagtccatcatcggcgtgaccttcgtctaccagcccggcgacgggaacgccgacgtgaccatcaccgtcaacggcaaggtggtggccaagtgaggactagtccctgttcccagagcccacttttttttctttttttgaaataaaatagcctgtctttcagatctaaaaaaaaaaaaaaaaaaaaaaaaaaaaaaaaaaaaaaaaaaaaaaaaaaaaaaaaaaaaaaaaaaaaaaaaaaaaaaaaaaaaaaaaaaaaaaaaaaaa

SEQ ID NO: 981 - RNA, 1229 nt, synthetic construct
  misc_feature 1..1229: note Artificial____HsIgE(1-18)_Ec(J96)-FimH(22-300)_Linker-(G4S) 3_Ec(J96)-FimC(135-148) mRNA opt1
  source 1..1229: mol_type = other RNA
aggagagtcccgcagtcggcgtccagcggctctgcttgttcgtgtgtgtgtcgttgcaggccttattcaagcttaccatggactggacctggatcctgttcctcgtggccgccgcgacccgcgtccacagcttcgcctgcaagaccgccaacggcaccgcgatccccatcgggggcgggagcgccaacgtgtacgtcaacctggccccggtggtgaacgtcggccagaacctcgtggtggacctgtccacgcagatcttctgccacaacgactaccccgagaccatcaccgactacgtcaccctgcagcgcgggagcgcctacggcggcgtgctctccaacttcagcgggacggtgaagtactccggcagctcctaccccttccccaccaccagcgagaccccgcgggtcgtgtacaactcccgcacggacaagccctggcccgtggccctgtacctgacccccgtcagctccgccgggggcgtggcgatcaaggccgggagcctcatcgccgtgctgatcctgcggcagaccaacaactacaactccgacgacttccagttcgtctggaacatctacgcgaacaacgacgtggtggtcccgaccggcggctgcgacgtgagcgcccgcgacgtgacggtcaccctccccgactaccccgggtccgtgcccatcccgctgaccgtgtactgcgccaagagccagaacctgggctactacctctccgggaccacggccgacgccggcaacagcatcttcaccaacaccgcgtccttcagccccgcccagggcgtcggggtgcagctgacccggaacggcacgatcatccccgccaacaacaccgtcagcctgggggccgtgggcacctccgccgtgagcctcgggctgaccgcgaactacgcccgcacgggcggccaggtcaccgccgggaacgtgcagtccatcatcggcgtgaccttcgtctaccagggcgggggcgggagcggcgggggcggctccgggggcgggggcagcacggagaacaccctgcagctcgccatcatctcccgcatcaagtgaggactagtccctgttcccagagcccacttttttttctttttttgaaataaaatagcctgtctttcagatctaaaaaaaaaaaaaaaaaaaaaaaaaaaaaaaaaaaaaaaaaaaaaaaaaaaaaaaaaaaaaaaaaaaaaaaaaaaaaaaaaaaaaaaaaaaaaaaaaaaa

SEQ ID NO: 982 - RNA, 1652 nt, synthetic construct
  misc_feature 1..1652: note Artificial____LumSynth(1-154_C37A_N102D)_Linker(GGS)4-GGG_E c(J96)-FimH(22-300)_Linker-PGDGN_Ec(J96)-FimG(24-37) mRNA opt1
  source 1..1652: mol_type = other RNA
aggagagtcccgcagtcggcgtccagcggctctgcttgttcgtgtgtgtgtcgttgcaggccttattcaagcttaccatgcagatctacgagggcaagctgaccgccgaggggctccgcttcggcatcgtggccagccggttcaaccacgcgctggtcgaccgcctggtggagggggccatcgacgccatcgtgcggcacggcgggcgcgaggaggacatcaccctcgtccgggtgcccggctcctgggagatcccggtggccgccggcgagctggcccgcaaggaggacatcgacgcggtcatcgccatcggggtgctgatccggggcgccacgccccacttcgactacatcgccagcgaggtgtccaaggggctcgcggacctgagcctggagctccgcaagcccatcaccttcggcgtcatcaccgccgacaccctggagcaggccatcgagcgggccgggacgaagcacggcaacaagggctgggaggccgcgctgtccgccatcgagatggccaacctcttcaagagcctgcgcggcgggagcggcgggtccggcgggagcggcggctccgggggcgggttcgcctgcaagaccgccaacggcaccgcgatccccatcgggggcgggagcgccaacgtgtacgtcaacctggccccggtggtgaacgtcggccagaacctcgtggtggacctgtccacgcagatcttctgccacaacgactaccccgagaccatcaccgactacgtcaccctgcagcgcgggagcgcctacggcggcgtgctctccaacttcagcgggacggtgaagtactccggcagctcctaccccttccccaccaccagcgagaccccgcgggtcgtgtacaactcccgcacggacaagccctggcccgtggccctgtacctgacccccgtcagctccgccgggggcgtggcgatcaaggccgggagcctcatcgccgtgctgatcctgcggcagaccaacaactacaactccgacgacttccagttcgtctggaacatctacgcgaacaacgacgtggtggtcccgaccggcggctgcgacgtgagcgcccgcgacgtgacggtcaccctccccgactaccccgggtccgtgcccatcccgctgaccgtgtactgcgccaagagccagaacctgggctactacctctccgggaccacggccgacgccggcaacagcatcttcaccaacaccgcgtccttcagccccgcccagggcgtcggggtgcagctgacccggaacggcacgatcatccccgccaacaacaccgtcagcctgggggccgtgggcacctccgccgtgagcctcgggctgaccgcgaactacgcccgcacgggcggccaggtcaccgccgggaacgtgcagtccatcatcggcgtgaccttcgtctaccagcccggcgacgggaacgccgacgtgaccatcaccgtcaacggcaaggtggtggccaagtgaggactagtccctgttcccagagcccacttttttttctttttttgaaataaaatagcctgtctttcagatctaaaaaaaaaaaaaaaaaaaaaaaaaaaaaaaaaaaaaaaaaaaaaaaaaaaaaaaaaaaaaaaaaaaaaaaaaaaaaaaaaaaaaaaaaaaaaaaaaaaa

SEQ ID NO: 983 - RNA, 1670 nt, synthetic construct
  misc_feature 1..1670: note Artificial____HsIgE(1-18)_Ec(J96)-FimH(22-300)_Linker-PGDGN _Ec(J96)-FimG(24-37)_Linker-SGG_LumSynth(1-154_C37A_N102D) mRNA opt1
  source 1..1670: mol_type = other RNA
aggagagtcccgcagtcggcgtccagcggctctgcttgttcgtgtgtgtgtcgttgcaggccttattcaagcttaccatggactggacctggatcctgttcctcgtggccgccgcgacccgcgtccacagcttcgcctgcaagaccgccaacggcaccgcgatccccatcgggggcgggagcgccaacgtgtacgtcaacctggccccggtggtgaacgtcggccagaacctcgtggtggacctgtccacgcagatcttctgccacaacgactaccccgagaccatcaccgactacgtcaccctgcagcgcgggagcgcctacggcggcgtgctctccaacttcagcgggacggtgaagtactccggcagctcctaccccttccccaccaccagcgagaccccgcgggtcgtgtacaactcccgcacggacaagccctggcccgtggccctgtacctgacccccgtcagctccgccgggggcgtggcgatcaaggccgggagcctcatcgccgtgctgatcctgcggcagaccaacaactacaactccgacgacttccagttcgtctggaacatctacgcgaacaacgacgtggtggtcccgaccggcggctgcgacgtgagcgcccgcgacgtgacggtcaccctccccgactaccccgggtccgtgcccatcccgctgaccgtgtactgcgccaagagccagaacctgggctactacctctccgggaccacggccgacgccggcaacagcatcttcaccaacaccgcgtccttcagccccgcccagggcgtcggggtgcagctgacccggaacggcacgatcatccccgccaacaacaccgtcagcctgggggccgtgggcacctccgccgtgagcctcgggctgaccgcgaactacgcccgcacgggcggccaggtcaccgccgggaacgtgcagtccatcatcggcgtgaccttcgtctaccagcccggcgacgggaacgccgacgtgaccatcaccgtcaacggcaaggtggtggccaagagcggcgggatgcagatctacgagggcaagctgaccgccgaggggctccgcttcggcatcgtggccagccggttcaaccacgcgctggtcgaccgcctggtggagggggccatcgacgccatcgtgcggcacggcgggcgcgaggaggacatcaccctcgtccgggtgcccggctcctgggagatcccggtggccgccggcgagctggcccgcaaggaggacatcgacgcggtcatcgccatcggggtgctgatccggggcgccacgccccacttcgactacatcgccagcgaggtgtccaaggggctcgcggacctgagcctggagctccgcaagcccatcaccttcggcgtcatcaccgccgacaccctggagcaggccatcgagcgggccgggacgaagcacggcaacaagggctgggaggccgcgctgtccgccatcgagatggccaacctcttcaagagcctgcgctgaggactagtccctgttcccagagcccacttttttttctttttttgaaataaaatagcctgtctttcagatctaaaaaaaaaaaaaaaaaaaaaaaaaaaaaaaaaaaaaaaaaaaaaaaaaaaaaaaaaaaaaaaaaaaaaaaaaaaaaaaaaaaaaaaaaaaaaaaaaaaa

SEQ ID NO: 984 - RNA, 1697 nt, synthetic construct
  misc_feature 1..1697: note Artificial____HsIgE(1-18)_Ec(J96)-FimH(22-300)_Linker-PGDGN _Ec(J96)-FimG(24-37)_Linker-SGG_Ferritin(5-167_N19Q) mRNA opt1
  source 1..1697: mol_type = other RNA
aggagagtcccgcagtcggcgtccagcggctctgcttgttcgtgtgtgtgtcgttgcaggccttattcaagcttaccatggactggacctggatcctgttcctcgtggccgccgcgacccgcgtccacagcttcgcctgcaagaccgccaacggcaccgcgatccccatcgggggcgggagcgccaacgtgtacgtcaacctggccccggtggtgaacgtcggccagaacctcgtggtggacctgtccacgcagatcttctgccacaacgactaccccgagaccatcaccgactacgtcaccctgcagcgcgggagcgcctacggcggcgtgctctccaacttcagcgggacggtgaagtactccggcagctcctaccccttccccaccaccagcgagaccccgcgggtcgtgtacaactcccgcacggacaagccctggcccgtggccctgtacctgacccccgtcagctccgccgggggcgtggcgatcaaggccgggagcctcatcgccgtgctgatcctgcggcagaccaacaactacaactccgacgacttccagttcgtctggaacatctacgcgaacaacgacgtggtggtcccgaccggcggctgcgacgtgagcgcccgcgacgtgacggtcaccctccccgactaccccgggtccgtgcccatcccgctgaccgtgtactgcgccaagagccagaacctgggctactacctctccgggaccacggccgacgccggcaacagcatcttcaccaacaccgcgtccttcagccccgcccagggcgtcggggtgcagctgacccggaacggcacgatcatccccgccaacaacaccgtcagcctgggggccgtgggcacctccgccgtgagcctcgggctgaccgcgaactacgcccgcacgggcggccaggtcaccgccgggaacgtgcagtccatcatcggcgtgaccttcgtctaccagcccggcgacgggaacgccgacgtgaccatcaccgtcaacggcaaggtggtggccaagagcggcggggacatcatcaagctcctgaacgagcaggtcaacaaggagatgcagtccagcaacctgtacatgtccatgagctcctggtgctacacccacagcctcgacggcgccgggctgttcctgttcgaccacgccgcggaggagtacgagcacgccaagaagctcatcatcttcctgaacgagaacaacgtgcccgtgcagctgacctccatcagcgccccggagcacaagttcgagggcctcacgcagatcttccagaaggcctacgagcacgagcagcacatctccgagagcatcaacaacatcgtggaccacgccatcaagtccaaggaccacgcgaccttcaacttcctgcagtggtacgtcgccgagcagcacgaggaggaggtgctgttcaaggacatcctcgacaagatcgagctgatcgggaacgagaaccacggcctgtacctcgccgaccagtacgtgaaggggatcgccaagagccgcaagtcctgaggactagtccctgttcccagagcccacttttttttctttttttgaaataaaatagcctgtctttcagatctaaaaaaaaaaaaaaaaaaaaaaaaaaaaaaaaaaaaaaaaaaaaaaaaaaaaaaaaaaaaaaaaaaaaaaaaaaaaaaaaaaaaaaaaaaaaaaaaaaaa

SEQ ID NO: 985 - RNA, 1727 nt, synthetic construct
  misc_feature 1..1727: note Artificial____MmIgK(1-20)_Ec(J96)-FimH(22-300)_Linker-PGDGN _Ec(J96)-FimG(24-37)_Linker-(GGS)4_Ferritin(5-166) mRNA opt1
  source 1..1727: mol_type = other RNA
aggagagtcccgcagtcggcgtccagcggctctgcttgttcgtgtgtgtgtcgttgcaggccttattcaagcttaccatggagaccgacaccctgctcctgtgggtgctgctcctgtgggtccccggcagcacggggttcgcctgcaagaccgccaacggcaccgcgatccccatcgggggcgggagcgccaacgtgtacgtcaacctggccccggtggtgaacgtcggccagaacctcgtggtggacctgtccacgcagatcttctgccacaacgactaccccgagaccatcaccgactacgtcaccctgcagcgcgggagcgcctacggcggcgtgctctccaacttcagcgggacggtgaagtactccggcagctcctaccccttccccaccaccagcgagaccccgcgggtcgtgtacaactcccgcacggacaagccctggcccgtggccctgtacctgacccccgtcagctccgccgggggcgtggcgatcaaggccgggagcctcatcgccgtgctgatcctgcggcagaccaacaactacaactccgacgacttccagttcgtctggaacatctacgcgaacaacgacgtggtggtcccgaccggcggctgcgacgtgagcgcccgcgacgtgacggtcaccctccccgactaccccgggtccgtgcccatcccgctgaccgtgtactgcgccaagagccagaacctgggctactacctctccgggaccacggccgacgccggcaacagcatcttcaccaacaccgcgtccttcagccccgcccagggcgtcggggtgcagctgacccggaacggcacgatcatccccgccaacaacaccgtcagcctgggggccgtgggcacctccgccgtgagcctcgggctgaccgcgaactacgcccgcacgggcggccaggtcaccgccgggaacgtgcagtccatcatcggcgtgaccttcgtctaccagcccggcgacgggaacgccgacgtgaccatcaccgtcaacggcaaggtggtggccaagggcgggagcggcgggtccggcgggagcggcggctccgacatcatcaagctcctgaacgagcaggtcaacaaggagatgaactccagcaacctgtacatgtccatgagctcctggtgctacacccacagcctcgacggcgccgggctgttcctgttcgaccacgccgcggaggagtacgagcacgccaagaagctcatcatcttcctgaacgagaacaacgtgcccgtgcagctgacctccatcagcgccccggagcacaagttcgagggcctcacgcagatcttccagaaggcctacgagcacgagcagcacatctccgagagcatcaacaacatcgtggaccacgccatcaagtccaaggaccacgcgaccttcaacttcctgcagtggtacgtcgccgagcagcacgaggaggaggtgctgttcaaggacatcctcgacaagatcgagctgatcgggaacgagaaccacggcctgtacctcgccgaccagtacgtgaaggggatcgccaagagccgcaagtgaggactagtccctgttcccagagcccacttttttttctttttttgaaataaaatagcctgtctttcagatctaaaaaaaaaaaaaaaaaaaaaaaaaaaaaaaaaaaaaaaaaaaaaaaaaaaaaaaaaaaaaaaaaaaaaaaaaaaaaaaaaaaaaaaaaaaaaaaaaaaa

SEQ ID NO: 986 - RNA, 1370 nt, synthetic construct
  misc_feature 1..1370: note Artificial____HsIgE(1-18)_Ec(J96)-FimH(22-300)_Linker-PGDGN _Ec(J96)-FimG(24-37)_TMdomain-HA(510-566) mRNA opt1
  source 1..1370: mol_type = other RNA
aggagagtcccgcagtcggcgtccagcggctctgcttgttcgtgtgtgtgtcgttgcaggccttattcaagcttaccatggactggacctggatcctgttcctcgtggccgccgcgacccgcgtccacagcttcgcctgcaagaccgccaacggcaccgcgatccccatcgggggcgggagcgccaacgtgtacgtcaacctggccccggtggtgaacgtcggccagaacctcgtggtggacctgtccacgcagatcttctgccacaacgactaccccgagaccatcaccgactacgtcaccctgcagcgcgggagcgcctacggcggcgtgctctccaacttcagcgggacggtgaagtactccggcagctcctaccccttccccaccaccagcgagaccccgcgggtcgtgtacaactcccgcacggacaagccctggcccgtggccctgtacctgacccccgtcagctccgccgggggcgtggcgatcaaggccgggagcctcatcgccgtgctgatcctgcggcagaccaacaactacaactccgacgacttccagttcgtctggaacatctacgcgaacaacgacgtggtggtcccgaccggcggctgcgacgtgagcgcccgcgacgtgacggtcaccctccccgactaccccgggtccgtgcccatcccgctgaccgtgtactgcgccaagagccagaacctgggctactacctctccgggaccacggccgacgccggcaacagcatcttcaccaacaccgcgtccttcagccccgcccagggcgtcggggtgcagctgacccggaacggcacgatcatccccgccaacaacaccgtcagcctgggggccgtgggcacctccgccgtgagcctcgggctgaccgcgaactacgcccgcacgggcggccaggtcaccgccgggaacgtgcagtccatcatcggcgtgaccttcgtctaccagcccggcgacgggaacgccgacgtgaccatcaccgtcaacggcaaggtggtggccaaggccaagctgaaccgcgaggagatcgacggcgtgaagctcgagtccacgcggatctaccagatcctggcgatctacagcaccgtcgccagctccctggtgctcgtggtcagcctgggggccatctccttctggatgtgcagcaacggctccctgcagtgccgcatctgcatctgaggactagtccctgttcccagagcccacttttttttctttttttgaaataaaatagcctgtctttcagatctaaaaaaaaaaaaaaaaaaaaaaaaaaaaaaaaaaaaaaaaaaaaaaaaaaaaaaaaaaaaaaaaaaaaaaaaaaaaaaaaaaaaaaaaaaaaaaaaaaaa

SEQ ID NO: 987 - RNA, 1703 nt, synthetic construct
  misc_feature 1..1703: note Artificial____HsIgE(1-18)_LumSynth(1-154_C37A_N102D)_Linker (GGS)4-GGG_Ec(J96)-FimH(22-300)_Linker-PGDGN_Ec(J96)-FimG(2 4-37) mRNA opt1
  source 1..1703: mol_type = other RNA
aggagagtcccgcagtcggcgtccagcggctctgcttgttcgtgtgtgtgtcgttgcaggccttattcaagcttaccatggactggacctggatcctgttcctcgtggccgccgcgacccgcgtccacagccagatctacgagggcaagctgaccgccgaggggctccgcttcggcatcgtggccagccggttcaaccacgcgctggtcgaccgcctggtggagggggccatcgacgccatcgtgcggcacggcgggcgcgaggaggacatcaccctcgtccgggtgcccggctcctgggagatcccggtggccgccggcgagctggcccgcaaggaggacatcgacgcggtcatcgccatcggggtgctgatccggggcgccacgccccacttcgactacatcgccagcgaggtgtccaaggggctcgcggacctgagcctggagctccgcaagcccatcaccttcggcgtcatcaccgccgacaccctggagcaggccatcgagcgggccgggacgaagcacggcaacaagggctgggaggccgcgctgtccgccatcgagatggccaacctcttcaagagcctgcgcggcgggagcggcgggtccggcgggagcggcggctccgggggcgggttcgcctgcaagaccgccaacggcaccgcgatccccatcgggggcgggagcgccaacgtgtacgtcaacctggccccggtggtgaacgtcggccagaacctcgtggtggacctgtccacgcagatcttctgccacaacgactaccccgagaccatcaccgactacgtcaccctgcagcgcgggagcgcctacggcggcgtgctctccaacttcagcgggacggtgaagtactccggcagctcctaccccttccccaccaccagcgagaccccgcgggtcgtgtacaactcccgcacggacaagccctggcccgtggccctgtacctgacccccgtcagctccgccgggggcgtggcgatcaaggccgggagcctcatcgccgtgctgatcctgcggcagaccaacaactacaactccgacgacttccagttcgtctggaacatctacgcgaacaacgacgtggtggtcccgaccggcggctgcgacgtgagcgcccgcgacgtgacggtcaccctccccgactaccccgggtccgtgcccatcccgctgaccgtgtactgcgccaagagccagaacctgggctactacctctccgggaccacggccgacgccggcaacagcatcttcaccaacaccgcgtccttcagccccgcccagggcgtcggggtgcagctgacccggaacggcacgatcatccccgccaacaacaccgtcagcctgggggccgtgggcacctccgccgtgagcctcgggctgaccgcgaactacgcccgcacgggcggccaggtcaccgccgggaacgtgcagtccatcatcggcgtgaccttcgtctaccagcccggcgacgggaacgccgacgtgaccatcaccgtcaacggcaaggtggtggccaagtgaggactagtccctgttcccagagcccacttttttttctttttttgaaataaaatagcctgtctttcagatctaaaaaaaaaaaaaaaaaaaaaaaaaaaaaaaaaaaaaaaaaaaaaaaaaaaaaaaaaaaaaaaaaaaaaaaaaaaaaaaaaaaaaaaaaaaaaaaaaaaa

SEQ ID NO: 988 - RNA, 1670 nt, synthetic construct
  misc_feature 1..1670: note Artificial____HsIgE(1-18)_Ec(J96)-FimH(22-300_N28S_N91S_N24 9Q)_Linker-PGDGN_Ec(J96)-FimG(24-37)_Linker-SGG_LumSynth(1- 154_C37A_N102D) mRNA opt1
  source 1..1670: mol_type = other RNA
aggagagtcccgcagtcggcgtccagcggctctgcttgttcgtgtgtgtgtcgttgcaggccttattcaagcttaccatggactggacctggatcctgttcctcgtggccgccgcgacccgcgtccacagcttcgcctgcaagaccgccagcggcaccgcgatccccatcgggggcgggagcgccaacgtgtacgtcaacctggccccggtggtgaacgtcggccagaacctcgtggtggacctgtccacgcagatcttctgccacaacgactaccccgagaccatcaccgactacgtcaccctgcagcgcgggagcgcctacggcggcgtgctctccagcttcagcgggacggtgaagtactccggcagctcctaccccttccccaccaccagcgagaccccgcgggtcgtgtacaactcccgcacggacaagccctggcccgtggccctgtacctgacccccgtcagctccgccgggggcgtggcgatcaaggccgggagcctcatcgccgtgctgatcctgcggcagaccaacaactacaactccgacgacttccagttcgtctggaacatctacgcgaacaacgacgtggtggtcccgaccggcggctgcgacgtgagcgcccgcgacgtgacggtcaccctccccgactaccccgggtccgtgcccatcccgctgaccgtgtactgcgccaagagccagaacctgggctactacctctccgggaccacggccgacgccggcaacagcatcttcaccaacaccgcgtccttcagccccgcccagggcgtcggggtgcagctgacccggcagggcacgatcatccccgccaacaacaccgtcagcctgggggccgtgggcacctccgccgtgagcctcgggctgaccgcgaactacgcccgcacgggcggccaggtcaccgccgggaacgtgcagtccatcatcggcgtgaccttcgtctaccagcccggcgacgggaacgccgacgtgaccatcaccgtcaacggcaaggtggtggccaagagcggcgggatgcagatctacgagggcaagctgaccgccgaggggctccgcttcggcatcgtggccagccggttcaaccacgcgctggtcgaccgcctggtggagggggccatcgacgccatcgtgcggcacggcgggcgcgaggaggacatcaccctcgtccgggtgcccggctcctgggagatcccggtggccgccggcgagctggcccgcaaggaggacatcgacgcggtcatcgccatcggggtgctgatccggggcgccacgccccacttcgactacatcgccagcgaggtgtccaaggggctcgcggacctgagcctggagctccgcaagcccatcaccttcggcgtcatcaccgccgacaccctggagcaggccatcgagcgggccgggacgaagcacggcaacaagggctgggaggccgcgctgtccgccatcgagatggccaacctcttcaagagcctgcgctgaggactagtccctgttcccagagcccacttttttttctttttttgaaataaaatagcctgtctttcagatctaaaaaaaaaaaaaaaaaaaaaaaaaaaaaaaaaaaaaaaaaaaaaaaaaaaaaaaaaaaaaaaaaaaaaaaaaaaaaaaaaaaaaaaaaaaaaaaaaaaa

SEQ ID NO: 989 - RNA, 1670 nt, synthetic construct
  misc_feature 1..1670: note Artificial____HsIgE(1-18)_Ec(J96)-FimH(22-300_N28S_N91S_N24 9Q_N256D)_Linker-PGDGN_Ec(J96)-FimG(24-37)_Linker-SGG_LumSy nth(1-154_C37A_N102D) mRNA opt1
  source 1..1670: mol_type = other RNA
aggagagtcccgcagtcggcgtccagcggctctgcttgttcgtgtgtgtgtcgttgcaggccttattcaagcttaccatggactggacctggatcctgttcctcgtggccgccgcgacccgcgtccacagcttcgcctgcaagaccgccagcggcaccgcgatccccatcgggggcgggagcgccaacgtgtacgtcaacctggccccggtggtgaacgtcggccagaacctcgtggtggacctgtccacgcagatcttctgccacaacgactaccccgagaccatcaccgactacgtcaccctgcagcgcgggagcgcctacggcggcgtgctctccagcttcagcgggacggtgaagtactccggcagctcctaccccttccccaccaccagcgagaccccgcgggtcgtgtacaactcccgcacggacaagccctggcccgtggccctgtacctgacccccgtcagctccgccgggggcgtggcgatcaaggccgggagcctcatcgccgtgctgatcctgcggcagaccaacaactacaactccgacgacttccagttcgtctggaacatctacgcgaacaacgacgtggtggtcccgaccggcggctgcgacgtgagcgcccgcgacgtgacggtcaccctccccgactaccccgggtccgtgcccatcccgctgaccgtgtactgcgccaagagccagaacctgggctactacctctccgggaccacggccgacgccggcaacagcatcttcaccaacaccgcgtccttcagccccgcccagggcgtcggggtgcagctgacccggcagggcacgatcatccccgccgacaacaccgtcagcctgggggccgtgggcacctccgccgtgagcctcgggctgaccgcgaactacgcccgcacgggcggccaggtcaccgccgggaacgtgcagtccatcatcggcgtgaccttcgtctaccagcccggcgacgggaacgccgacgtgaccatcaccgtcaacggcaaggtggtggccaagagcggcgggatgcagatctacgagggcaagctgaccgccgaggggctccgcttcggcatcgtggccagccggttcaaccacgcgctggtcgaccgcctggtggagggggccatcgacgccatcgtgcggcacggcgggcgcgaggaggacatcaccctcgtccgggtgcccggctcctgggagatcccggtggccgccggcgagctggcccgcaaggaggacatcgacgcggtcatcgccatcggggtgctgatccggggcgccacgccccacttcgactacatcgccagcgaggtgtccaaggggctcgcggacctgagcctggagctccgcaagcccatcaccttcggcgtcatcaccgccgacaccctggagcaggccatcgagcgggccgggacgaagcacggcaacaagggctgggaggccgcgctgtccgccatcgagatggccaacctcttcaagagcctgcgctgaggactagtccctgttcccagagcccacttttttttctttttttgaaataaaatagcctgtctttcagatctaaaaaaaaaaaaaaaaaaaaaaaaaaaaaaaaaaaaaaaaaaaaaaaaaaaaaaaaaaaaaaaaaaaaaaaaaaaaaaaaaaaaaaaaaaaaaaaaaaaa

SEQ ID NO: 990 - RNA, 1670 nt, synthetic construct
  misc_feature 1..1670: note Artificial____HsIgE(1-18)_Ec(J96)-FimH(22-300_N28S_V48C_L55 C_N91S_N249Q)_Linker-PGDGN_Ec(J96)-FimG(24-37)_Linker-SGG_L umSynth(1-154_C37A_N102D) mRNA opt1
  source 1..1670: mol_type = other RNA
aggagagtcccgcagtcggcgtccagcggctctgcttgttcgtgtgtgtgtcgttgcaggccttattcaagcttaccatggactggacctggatcctgttcctcgtggccgccgcgacccgcgtccacagcttcgcctgcaagaccgccagcggcaccgcgatccccatcgggggcgggagcgccaacgtgtacgtcaacctggccccgtgcgtgaacgtcggccagaactgcgtggtggacctgtccacgcagatcttctgccacaacgactaccccgagaccatcaccgactacgtcaccctgcagcgcgggagcgcctacggcggcgtgctctccagcttcagcgggacggtgaagtactccggcagctcctaccccttccccaccaccagcgagaccccgcgggtcgtgtacaactcccgcacggacaagccctggcccgtggccctgtacctgacccccgtcagctccgccgggggcgtggcgatcaaggccgggagcctcatcgccgtgctgatcctgcggcagaccaacaactacaactccgacgacttccagttcgtctggaacatctacgcgaacaacgacgtggtggtcccgaccggcggctgcgacgtgagcgcccgcgacgtgacggtcaccctccccgactaccccgggtccgtgcccatcccgctgaccgtgtactgcgccaagagccagaacctgggctactacctctccgggaccacggccgacgccggcaacagcatcttcaccaacaccgcgtccttcagccccgcccagggcgtcggggtgcagctgacccggcagggcacgatcatccccgccaacaacaccgtcagcctgggggccgtgggcacctccgccgtgagcctcgggctgaccgcgaactacgcccgcacgggcggccaggtcaccgccgggaacgtgcagtccatcatcggcgtgaccttcgtctaccagcccggcgacgggaacgccgacgtgaccatcaccgtcaacggcaaggtggtggccaagagcggcgggatgcagatctacgagggcaagctgaccgccgaggggctccgcttcggcatcgtggccagccggttcaaccacgcgctggtcgaccgcctggtggagggggccatcgacgccatcgtgcggcacggcgggcgcgaggaggacatcaccctcgtccgggtgcccggctcctgggagatcccggtggccgccggcgagctggcccgcaaggaggacatcgacgcggtcatcgccatcggggtgctgatccggggcgccacgccccacttcgactacatcgccagcgaggtgtccaaggggctcgcggacctgagcctggagctccgcaagcccatcaccttcggcgtcatcaccgccgacaccctggagcaggccatcgagcgggccgggacgaagcacggcaacaagggctgggaggccgcgctgtccgccatcgagatggccaacctcttcaagagcctgcgctgaggactagtccctgttcccagagcccacttttttttctttttttgaaataaaatagcctgtctttcagatctaaaaaaaaaaaaaaaaaaaaaaaaaaaaaaaaaaaaaaaaaaaaaaaaaaaaaaaaaaaaaaaaaaaaaaaaaaaaaaaaaaaaaaaaaaaaaaaaaaaa

SEQ ID NO: 991 - RNA, 1670 nt, synthetic construct
  misc_feature 1..1670: note Artificial____HsIgE(1-18)_Ec(J96)-FimH(22-300_F165V)_Linker -PGDGN_Ec(J96)-FimG(24-37)_Linker-SGG_LumSynth(1-154_C37A_N 102D) mRNA opt1
  source 1..1670: mol_type = other RNA
aggagagtcccgcagtcggcgtccagcggctctgcttgttcgtgtgtgtgtcgttgcaggccttattcaagcttaccatggactggacctggatcctgttcctcgtggccgccgcgacccgcgtccacagcttcgcctgcaagaccgccaacggcaccgcgatccccatcgggggcgggagcgccaacgtgtacgtcaacctggccccggtggtgaacgtcggccagaacctcgtggtggacctgtccacgcagatcttctgccacaacgactaccccgagaccatcaccgactacgtcaccctgcagcgcgggagcgcctacggcggcgtgctctccaacttcagcgggacggtgaagtactccggcagctcctaccccttccccaccaccagcgagaccccgcgggtcgtgtacaactcccgcacggacaagccctggcccgtggccctgtacctgacccccgtcagctccgccgggggcgtggcgatcaaggccgggagcctcatcgccgtgctgatcctgcggcagaccaacaactacaactccgacgacttccaggtggtctggaacatctacgcgaacaacgacgtggtggtcccgaccggcggctgcgacgtgagcgcccgcgacgtgacggtcaccctccccgactaccccgggtccgtgcccatcccgctgaccgtgtactgcgccaagagccagaacctgggctactacctctccgggaccacggccgacgccggcaacagcatcttcaccaacaccgcgtccttcagccccgcccagggcgtcggggtgcagctgacccggaacggcacgatcatccccgccaacaacaccgtcagcctgggggccgtgggcacctccgccgtgagcctcgggctgaccgcgaactacgcccgcacgggcggccaggtcaccgccgggaacgtgcagtccatcatcggcgtgaccttcgtctaccagcccggcgacgggaacgccgacgtgaccatcaccgtcaacggcaaggtggtggccaagagcggcgggatgcagatctacgagggcaagctgaccgccgaggggctccgcttcggcatcgtggccagccggttcaaccacgcgctggtcgaccgcctggtggagggggccatcgacgccatcgtgcggcacggcgggcgcgaggaggacatcaccctcgtccgggtgcccggctcctgggagatcccggtggccgccggcgagctggcccgcaaggaggacatcgacgcggtcatcgccatcggggtgctgatccggggcgccacgccccacttcgactacatcgccagcgaggtgtccaaggggctcgcggacctgagcctggagctccgcaagcccatcaccttcggcgtcatcaccgccgacaccctggagcaggccatcgagcgggccgggacgaagcacggcaacaagggctgggaggccgcgctgtccgccatcgagatggccaacctcttcaagagcctgcgctgaggactagtccctgttcccagagcccacttttttttctttttttgaaataaaatagcctgtctttcagatctaaaaaaaaaaaaaaaaaaaaaaaaaaaaaaaaaaaaaaaaaaaaaaaaaaaaaaaaaaaaaaaaaaaaaaaaaaaaaaaaaaaaaaaaaaaaaaaaaaaa

SEQ ID NO: 992 - RNA, 1697 nt, synthetic construct
  misc_feature 1..1697: note Artificial____HsIgE(1-18)_Ec(J96)-FimH(22-300_N28S_N91S_N24 9Q)_Linker-PGDGN_Ec(J96)-FimG(24-37)_Linker-SGG_Ferritin(5- 167_N19Q) mRNA opt1
  source 1..1697: mol_type = other RNA
aggagagtcccgcagtcggcgtccagcggctctgcttgttcgtgtgtgtgtcgttgcaggccttattcaagcttaccatggactggacctggatcctgttcctcgtggccgccgcgacccgcgtccacagcttcgcctgcaagaccgccagcggcaccgcgatccccatcgggggcgggagcgccaacgtgtacgtcaacctggccccggtggtgaacgtcggccagaacctcgtggtggacctgtccacgcagatcttctgccacaacgactaccccgagaccatcaccgactacgtcaccctgcagcgcgggagcgcctacggcggcgtgctctccagcttcagcgggacggtgaagtactccggcagctcctaccccttccccaccaccagcgagaccccgcgggtcgtgtacaactcccgcacggacaagccctggcccgtggccctgtacctgacccccgtcagctccgccgggggcgtggcgatcaaggccgggagcctcatcgccgtgctgatcctgcggcagaccaacaactacaactccgacgacttccagttcgtctggaacatctacgcgaacaacgacgtggtggtcccgaccggcggctgcgacgtgagcgcccgcgacgtgacggtcaccctccccgactaccccgggtccgtgcccatcccgctgaccgtgtactgcgccaagagccagaacctgggctactacctctccgggaccacggccgacgccggcaacagcatcttcaccaacaccgcgtccttcagccccgcccagggcgtcggggtgcagctgacccggcagggcacgatcatccccgccaacaacaccgtcagcctgggggccgtgggcacctccgccgtgagcctcgggctgaccgcgaactacgcccgcacgggcggccaggtcaccgccgggaacgtgcagtccatcatcggcgtgaccttcgtctaccagcccggcgacgggaacgccgacgtgaccatcaccgtcaacggcaaggtggtggccaagagcggcggggacatcatcaagctcctgaacgagcaggtcaacaaggagatgcagtccagcaacctgtacatgtccatgagctcctggtgctacacccacagcctcgacggcgccgggctgttcctgttcgaccacgccgcggaggagtacgagcacgccaagaagctcatcatcttcctgaacgagaacaacgtgcccgtgcagctgacctccatcagcgccccggagcacaagttcgagggcctcacgcagatcttccagaaggcctacgagcacgagcagcacatctccgagagcatcaacaacatcgtggaccacgccatcaagtccaaggaccacgcgaccttcaacttcctgcagtggtacgtcgccgagcagcacgaggaggaggtgctgttcaaggacatcctcgacaagatcgagctgatcgggaacgagaaccacggcctgtacctcgccgaccagtacgtgaaggggatcgccaagagccgcaagtcctgaggactagtccctgttcccagagcccacttttttttctttttttgaaataaaatagcctgtctttcagatctaaaaaaaaaaaaaaaaaaaaaaaaaaaaaaaaaaaaaaaaaaaaaaaaaaaaaaaaaaaaaaaaaaaaaaaaaaaaaaaaaaaaaaaaaaaaaaaaaaaa

SEQ ID NO: 993 - RNA, 1697 nt, synthetic construct
  misc_feature 1..1697: note Artificial____HsIgE(1-18)_Ec(J96)-FimH(22-300_N28S_N91S_N24 9Q_N256D)_Linker-PGDGN_Ec(J96)-FimG(24-37)_Linker-SGG_Ferri tin(5-167_N19Q) mRNA opt1
  source 1..1697: mol_type = other RNA
aggagagtcccgcagtcggcgtccagcggctctgcttgttcgtgtgtgtgtcgttgcaggccttattcaagcttaccatggactggacctggatcctgttcctcgtggccgccgcgacccgcgtccacagcttcgcctgcaagaccgccagcggcaccgcgatccccatcgggggcgggagcgccaacgtgtacgtcaacctggccccggtggtgaacgtcggccagaacctcgtggtggacctgtccacgcagatcttctgccacaacgactaccccgagaccatcaccgactacgtcaccctgcagcgcgggagcgcctacggcggcgtgctctccagcttcagcgggacggtgaagtactccggcagctcctaccccttccccaccaccagcgagaccccgcgggtcgtgtacaactcccgcacggacaagccctggcccgtggccctgtacctgacccccgtcagctccgccgggggcgtggcgatcaaggccgggagcctcatcgccgtgctgatcctgcggcagaccaacaactacaactccgacgacttccagttcgtctggaacatctacgcgaacaacgacgtggtggtcccgaccggcggctgcgacgtgagcgcccgcgacgtgacggtcaccctccccgactaccccgggtccgtgcccatcccgctgaccgtgtactgcgccaagagccagaacctgggctactacctctccgggaccacggccgacgccggcaacagcatcttcaccaacaccgcgtccttcagccccgcccagggcgtcggggtgcagctgacccggcagggcacgatcatccccgccgacaacaccgtcagcctgggggccgtgggcacctccgccgtgagcctcgggctgaccgcgaactacgcccgcacgggcggccaggtcaccgccgggaacgtgcagtccatcatcggcgtgaccttcgtctaccagcccggcgacgggaacgccgacgtgaccatcaccgtcaacggcaaggtggtggccaagagcggcggggacatcatcaagctcctgaacgagcaggtcaacaaggagatgcagtccagcaacctgtacatgtccatgagctcctggtgctacacccacagcctcgacggcgccgggctgttcctgttcgaccacgccgcggaggagtacgagcacgccaagaagctcatcatcttcctgaacgagaacaacgtgcccgtgcagctgacctccatcagcgccccggagcacaagttcgagggcctcacgcagatcttccagaaggcctacgagcacgagcagcacatctccgagagcatcaacaacatcgtggaccacgccatcaagtccaaggaccacgcgaccttcaacttcctgcagtggtacgtcgccgagcagcacgaggaggaggtgctgttcaaggacatcctcgacaagatcgagctgatcgggaacgagaaccacggcctgtacctcgccgaccagtacgtgaaggggatcgccaagagccgcaagtcctgaggactagtccctgttcccagagcccacttttttttctttttttgaaataaaatagcctgtctttcagatctaaaaaaaaaaaaaaaaaaaaaaaaaaaaaaaaaaaaaaaaaaaaaaaaaaaaaaaaaaaaaaaaaaaaaaaaaaaaaaaaaaaaaaaaaaaaaaaaaaaa

SEQ ID NO: 994 - RNA, 1697 nt, synthetic construct
  misc_feature 1..1697: note Artificial____HsIgE(1-18)_Ec(J96)-FimH(22-300_N28S_V48C_L55 C_N91S_N249Q)_Linker-PGDGN_Ec(J96)-FimG(24-37)_Linker-SGG_F erritin(5-167_N19Q) mRNA opt1
  source 1..1697: mol_type = other RNA
aggagagtcccgcagtcggcgtccagcggctctgcttgttcgtgtgtgtgtcgttgcaggccttattcaagcttaccatggactggacctggatcctgttcctcgtggccgccgcgacccgcgtccacagcttcgcctgcaagaccgccagcggcaccgcgatccccatcgggggcgggagcgccaacgtgtacgtcaacctggccccgtgcgtgaacgtcggccagaactgcgtggtggacctgtccacgcagatcttctgccacaacgactaccccgagaccatcaccgactacgtcaccctgcagcgcgggagcgcctacggcggcgtgctctccagcttcagcgggacggtgaagtactccggcagctcctaccccttccccaccaccagcgagaccccgcgggtcgtgtacaactcccgcacggacaagccctggcccgtggccctgtacctgacccccgtcagctccgccgggggcgtggcgatcaaggccgggagcctcatcgccgtgctgatcctgcggcagaccaacaactacaactccgacgacttccagttcgtctggaacatctacgcgaacaacgacgtggtggtcccgaccggcggctgcgacgtgagcgcccgcgacgtgacggtcaccctccccgactaccccgggtccgtgcccatcccgctgaccgtgtactgcgccaagagccagaacctgggctactacctctccgggaccacggccgacgccggcaacagcatcttcaccaacaccgcgtccttcagccccgcccagggcgtcggggtgcagctgacccggcagggcacgatcatccccgccaacaacaccgtcagcctgggggccgtgggcacctccgccgtgagcctcgggctgaccgcgaactacgcccgcacgggcggccaggtcaccgccgggaacgtgcagtccatcatcggcgtgaccttcgtctaccagcccggcgacgggaacgccgacgtgaccatcaccgtcaacggcaaggtggtggccaagagcggcggggacatcatcaagctcctgaacgagcaggtcaacaaggagatgcagtccagcaacctgtacatgtccatgagctcctggtgctacacccacagcctcgacggcgccgggctgttcctgttcgaccacgccgcggaggagtacgagcacgccaagaagctcatcatcttcctgaacgagaacaacgtgcccgtgcagctgacctccatcagcgccccggagcacaagttcgagggcctcacgcagatcttccagaaggcctacgagcacgagcagcacatctccgagagcatcaacaacatcgtggaccacgccatcaagtccaaggaccacgcgaccttcaacttcctgcagtggtacgtcgccgagcagcacgaggaggaggtgctgttcaaggacatcctcgacaagatcgagctgatcgggaacgagaaccacggcctgtacctcgccgaccagtacgtgaaggggatcgccaagagccgcaagtcctgaggactagtccctgttcccagagcccacttttttttctttttttgaaataaaatagcctgtctttcagatctaaaaaaaaaaaaaaaaaaaaaaaaaaaaaaaaaaaaaaaaaaaaaaaaaaaaaaaaaaaaaaaaaaaaaaaaaaaaaaaaaaaaaaaaaaaaaaaaaaaa

SEQ ID NO: 995 - RNA, 1697 nt, synthetic construct
  misc_feature 1..1697: note Artificial____HsIgE(1-18)_Ec(J96)-FimH(22-300_F165V)_Linker -PGDGN_Ec(J96)-FimG(24-37)_Linker-SGG_Ferritin(5-167_N19Q) mRNA opt1
  source 1..1697: mol_type = other RNA
aggagagtcccgcagtcggcgtccagcggctctgcttgttcgtgtgtgtgtcgttgcaggccttattcaagcttaccatggactggacctggatcctgttcctcgtggccgccgcgacccgcgtccacagcttcgcctgcaagaccgccaacggcaccgcgatccccatcgggggcgggagcgccaacgtgtacgtcaacctggccccggtggtgaacgtcggccagaacctcgtggtggacctgtccacgcagatcttctgccacaacgactaccccgagaccatcaccgactacgtcaccctgcagcgcgggagcgcctacggcggcgtgctctccaacttcagcgggacggtgaagtactccggcagctcctaccccttccccaccaccagcgagaccccgcgggtcgtgtacaactcccgcacggacaagccctggcccgtggccctgtacctgacccccgtcagctccgccgggggcgtggcgatcaaggccgggagcctcatcgccgtgctgatcctgcggcagaccaacaactacaactccgacgacttccaggtggtctggaacatctacgcgaacaacgacgtggtggtcccgaccggcggctgcgacgtgagcgcccgcgacgtgacggtcaccctccccgactaccccgggtccgtgcccatcccgctgaccgtgtactgcgccaagagccagaacctgggctactacctctccgggaccacggccgacgccggcaacagcatcttcaccaacaccgcgtccttcagccccgcccagggcgtcggggtgcagctgacccggaacggcacgatcatccccgccaacaacaccgtcagcctgggggccgtgggcacctccgccgtgagcctcgggctgaccgcgaactacgcccgcacgggcggccaggtcaccgccgggaacgtgcagtccatcatcggcgtgaccttcgtctaccagcccggcgacgggaacgccgacgtgaccatcaccgtcaacggcaaggtggtggccaagagcggcggggacatcatcaagctcctgaacgagcaggtcaacaaggagatgcagtccagcaacctgtacatgtccatgagctcctggtgctacacccacagcctcgacggcgccgggctgttcctgttcgaccacgccgcggaggagtacgagcacgccaagaagctcatcatcttcctgaacgagaacaacgtgcccgtgcagctgacctccatcagcgccccggagcacaagttcgagggcctcacgcagatcttccagaaggcctacgagcacgagcagcacatctccgagagcatcaacaacatcgtggaccacgccatcaagtccaaggaccacgcgaccttcaacttcctgcagtggtacgtcgccgagcagcacgaggaggaggtgctgttcaaggacatcctcgacaagatcgagctgatcgggaacgagaaccacggcctgtacctcgccgaccagtacgtgaaggggatcgccaagagccgcaagtcctgaggactagtccctgttcccagagcccacttttttttctttttttgaaataaaatagcctgtctttcagatctaaaaaaaaaaaaaaaaaaaaaaaaaaaaaaaaaaaaaaaaaaaaaaaaaaaaaaaaaaaaaaaaaaaaaaaaaaaaaaaaaaaaaaaaaaaaaaaaaaaa

SEQ ID NO: 996 - RNA, 974 nt, synthetic construct
  misc_feature 1..974: note Artificial____Ec(J96)-FimC(1-36)_Ec(J96)-FimC(37-241) mRNA opt1
  source 1..974: mol_type = other RNA
aggagagtcccgcagtcggcgtccagcggctctgcttgttcgtgtgtgtgtcgttgcaggccttattcaagcttaccatgagcaacaagaacgtgaacgtccgcaagtcccaggagatcaccttctgcctgctcgccggcatcctgatgttcatggccatgatggtggcggggcgggccgaggccggcgtggccctgggggccacccgcgtcatctaccccgcgggccagaagcaggtccagctcgccgtgacgaacaacgacgagaacagcacctacctgatccagtcctgggtggagaacgccgacggggtgaaggacggccggttcatcgtgaccccgcccctgttcgccatgaagggcaagaaggagaacaccctccgcatcctggacgcgacgaacaaccagctgccccaggaccgggagagcctcttctggatgaacgtcaaggccatcccctccatggacaagagcaagctgaccgagaacaccctgcagctcgccatcatctcccgcatcaagctgtactaccggccggccaagctggccctcccgcccgaccaggcggccgagaagctgcgcttccggcgcagcgccaactccctgaccctcatcaaccccacgccctactacctgaccgtgaccgagctgaacgccgggacccgggtgctcgagaacgccctggtcccgcccatgggcgagagcacggtgaagctgccctccgacgcggggagcaacatcacctaccgcaccatcaacgactacggcgccctcacccccaagatgacgggggtgatggagtgaggactagtccctgttcccagagcccacttttttttctttttttgaaataaaatagcctgtctttcagatctaaaaaaaaaaaaaaaaaaaaaaaaaaaaaaaaaaaaaaaaaaaaaaaaaaaaaaaaaaaaaaaaaaaaaaaaaaaaaaaaaaaaaaaaaaaaaaaaaaaa

SEQ ID NO: 997 - RNA, 920 nt, synthetic construct
  misc_feature 1..920: note = Artificial____HsIgE(1-18)_Ec(J96)-FimC(37-241) mRNA opt1
  source 1..920: mol_type = other RNA
aggagagtcccgcagtcggcgtccagcggctctgcttgttcgtgtgtgtgtcgttgcaggccttattcaagcttaccatggactggacctggatcctgttcctcgtggccgccgcgacccgcgtccacagcggcgtggccctgggggccacgcgggtgatctaccccgccggccagaagcaggtccagctggccgtgaccaacaacgacgagaactccacctacctcatccagagctgggtggagaacgcggacggggtcaaggacggccgcttcatcgtgaccccgcccctgttcgccatgaaggggaagaaggagaacacgctgcggatcctcgacgccaccaacaaccagctgccccaggaccgcgagtccctgttctggatgaacgtgaaggccatccccagcatggacaagtccaagctcaccgagaacaccctgcagctggcgatcatcagccggatcaagctctactaccgcccggccaagctggccctgccgcccgaccaggccgccgagaagctccggttccgccggtccgcgaacagcctgacgctgatcaaccccaccccctactacctcaccgtcaccgagctgaacgccggcacgcgcgtgctggagaacgccctcgtgccgcccatgggcgagtccaccgtcaagctgcccagcgacgccgggtccaacatcacctaccggaccatcaacgactacggcgccctgacgcccaagatgaccggggtgatggagtgaggactagtccctgttcccagagcccacttttttttctttttttgaaataaaatagcctgtctttcagatctaaaaaaaaaaaaaaaaaaaaaaaaaaaaaaaaaaaaaaaaaaaaaaaaaaaaaaaaaaaaaaaaaaaaaaaaaaaaaaaaaaaaaaaaaaaaaaaaaaaa

SEQ ID NO: 998 - RNA, 1151 nt, synthetic construct
  misc_feature 1..1151: note Artificial____Ec(J96)-FimH(1-21)_Ec(J96)-FimH(22-300) mRNA opt1
  source 1..1151: mol_type = other RNA
aggagagtcccgcagtcggcgtccagcggctctgcttgttcgtgtgtgtgtcgttgcaggccttattcaagcttaccatgaagcgcgtgatcaccctgttcgccgtcctcctgatgggctggagcgtgaacgcctggtccttcgcgtgcaagaccgccaacgggacggccatccccatcggcgggggcagcgccaacgtgtacgtcaacctggccccggtggtgaacgtcgggcagaacctcgtggtggacctgtccacccagatcttctgccacaacgactaccccgagaccatcaccgactacgtcacgctgcagcggggcagcgcgtacggcggggtgctctccaacttcagcggcaccgtgaagtactccgggagctcctaccccttccccaccaccagcgagacgccgcgcgtcgtgtacaactcccggaccgacaagccctggcccgtggccctgtacctgacccccgtcagctccgccggcggggtggccatcaaggcgggcagcctcatcgccgtgctgatcctgcgccagaccaacaactacaactccgacgacttccagttcgtctggaacatctacgccaacaacgacgtggtggtcccgacgggcgggtgcgacgtgagcgcccgggacgtgaccgtcaccctccccgactaccccggctccgtgcccatcccgctgaccgtctactgcgccaagagccagaacctggggtactacctctccggcacgaccgcggacgccggcaacagcatcttcaccaacaccgccagcttctcccccgcccagggggtgggcgtgcagctgacgcgcaacgggaccatcatccccgccaacaacaccgtcagcctgggcgcggtggggacctccgccgtgagcctcggcctgacggccaactacgcccggaccggcgggcaggtcaccgccggcaacgtgcagtccatcatcggggtgaccttcgtctaccagtgaggactagtccctgttcccagagcccacttttttttctttttttgaaataaaatagcctgtctttcagatctaaaaaaaaaaaaaaaaaaaaaaaaaaaaaaaaaaaaaaaaaaaaaaaaaaaaaaaaaaaaaaaaaaaaaaaaaaaaaaaaaaaaaaaaaaaaaaaaaaaa

SEQ ID NO: 999 - RNA, 1142 nt, synthetic construct
  misc_feature 1..1142: note = Artificial____HsIgE(1-18)_Ec(J96)-FimH(22-300) mRNA opt1
  source 1..1142: mol_type = other RNA
aggagagtcccgcagtcggcgtccagcggctctgcttgttcgtgtgtgtgtcgttgcaggccttattcaagcttaccatggactggacctggatcctgttcctcgtggccgccgcgacccgcgtccacagcttcgcctgcaagacggccaacggcaccgccatccccatcgggggcgggtccgccaacgtgtacgtgaacctggcgccggtcgtgaacgtgggccagaacctggtcgtggacctcagcacccagatcttctgccacaacgactaccccgagaccatcacggactacgtgaccctgcagcgggggtccgcctacggcggcgtcctgagcaacttctccgggaccgtgaagtacagcggctccagctaccccttccccaccacgtccgagaccccgcgcgtggtctacaacagccggaccgacaagccctggcccgtggccctctacctgacccccgtgtccagcgccgggggcgtcgcgatcaaggccgggtccctgatcgccgtgctcatcctgcgccagacgaacaactacaacagcgacgacttccagttcgtgtggaacatctacgccaacaacgacgtcgtggtgccgaccggcggctgcgacgtctccgcccgggacgtgaccgtgaccctgcccgactaccccgggagcgtccccatcccgctcacggtgtactgcgcgaagtcccagaacctgggctactacctgagcgggaccaccgccgacgccggcaactccatcttcaccaacacggccagcttcagccccgcccagggcgtcggggtgcagctcacccgcaacggcaccatcatccccgcgaacaacaccgtgtccctgggggccgtcggcacgagcgccgtgtccctggggctcaccgccaactacgcccggaccggcggccaggtgaccgcggggaacgtccagagcatcatcggcgtgacgttcgtgtaccagtgaggactagtccctgttcccagagcccacttttttttctttttttgaaataaaatagcctgtctttcagatctaaaaaaaaaaaaaaaaaaaaaaaaaaaaaaaaaaaaaaaaaaaaaaaaaaaaaaaaaaaaaaaaaaaaaaaaaaaaaaaaaaaaaaaaaaaaaaaaaaaa

SEQ ID NO: 1000 - RNA, 1148 nt, synthetic construct
  misc_feature 1..1148: note = Artificial____MmIgK(1-20)_Ec(J96)-FimH(22-300) mRNA opt1
  source 1..1148: mol_type = other RNA
aggagagtcccgcagtcggcgtccagcggctctgcttgttcgtgtgtgtgtcgttgcaggccttattcaagcttaccatggagaccgacaccctgctcctgtgggtgctgctcctgtgggtccccggcagcacggggttcgcctgcaagaccgccaacggcaccgcgatcccgatcgggggcgggtccgccaacgtgtacgtgaacctggcccccgtcgtgaacgtgggccagaacctcgtcgtggacctgagcacccagatcttctgccacaacgactaccccgagacgatcaccgactacgtgaccctgcagcgcggctccgcctacgggggcgtcctcagcaacttctccgggaccgtgaagtacagcggctccagctaccccttcccgacgacctccgagacgccccgggtggtctacaacagccgcaccgacaagccctggcccgtggccctgtacctgaccccggtgtccagcgccgggggcgtcgcgatcaaggccggctccctcatcgccgtgctgatcctgcggcagaccaacaactacaacagcgacgacttccagttcgtgtggaacatctacgcgaacaacgacgtcgtggtgcccaccgggggctgcgacgtctccgcccgcgacgtgaccgtgacgctccccgactaccccgggagcgtcccgatccccctgaccgtgtactgcgccaagtcccagaacctgggctactacctcagcggcaccaccgccgacgccgggaactccatcttcacgaacaccgcgagcttcagccccgcccagggcgtcggggtgcagctgacccggaacggcaccatcatccccgccaacaacacggtgtccctgggggccgtcggcaccagcgccgtgtccctcggcctgaccgcgaactacgcccgcaccgggggccaggtgacggccgggaacgtccagagcatcatcggcgtgaccttcgtgtaccagtgaggactagtccctgttcccagagcccacttttttttctttttttgaaataaaatagcctgtctttcagatctaaaaaaaaaaaaaaaaaaaaaaaaaaaaaaaaaaaaaaaaaaaaaaaaaaaaaaaaaaaaaaaaaaaaaaaaaaaaaaaaaaaaaaaaaaaaaaaaaaaa

SEQ ID NO: 1001 - RNA, 1208 nt, synthetic construct
  misc_feature 1..1208: note Artificial____Ec(J96)-FimH(1-21)_Ec(J96)-FimH(22-300)_Linke r-PGDGN_Ec(J96)-FimG(24-37) mRNA opt1
  source 1..1208: mol_type = other RNA
aggagagtcccgcagtcggcgtccagcggctctgcttgttcgtgtgtgtgtcgttgcaggccttattcaagcttaccatgaagcgcgtgatcaccctgttcgccgtcctcctgatgggctggagcgtgaacgcctggtccttcgcgtgcaagaccgccaacgggacggccatccccatcggcgggggcagcgccaacgtgtacgtcaacctggccccggtggtgaacgtcgggcagaacctcgtggtggacctgtccacccagatcttctgccacaacgactaccccgagaccatcaccgactacgtcacgctgcagcggggcagcgcgtacggcggggtgctctccaacttcagcggcaccgtgaagtactccgggagctcctaccccttccccaccaccagcgagacgccgcgcgtcgtgtacaactcccggaccgacaagccctggcccgtggccctgtacctgacccccgtcagctccgccggcggggtggccatcaaggcgggcagcctcatcgccgtgctgatcctgcgccagaccaacaactacaactccgacgacttccagttcgtctggaacatctacgccaacaacgacgtggtggtcccgacgggcgggtgcgacgtgagcgcccgggacgtgaccgtcaccctccccgactaccccggctccgtgcccatcccgctgaccgtctactgcgccaagagccagaacctggggtactacctctccggcacgaccgcggacgccggcaacagcatcttcaccaacaccgccagcttctcccccgcccagggggtgggcgtgcagctgacgcgcaacgggaccatcatccccgccaacaacaccgtcagcctgggcgcggtggggacctccgccgtgagcctcggcctgacggccaactacgcccggaccggcgggcaggtcaccgccggcaacgtgcagtccatcatcggggtgaccttcgtctaccagcccggcgacgggaacgcggacgtgacgatcaccgtgaacggcaaggtcgtggccaagtgaggactagtccctgttcccagagcccacttttttttctttttttgaaataaaatagcctgtctttcagatctaaaaaaaaaaaaaaaaaaaaaaaaaaaaaaaaaaaaaaaaaaaaaaaaaaaaaaaaaaaaaaaaaaaaaaaaaaaaaaaaaaaaaaaaaaaaaaaaaaaa

SEQ ID NO: 1002 - RNA, 1199 nt, synthetic construct
  misc_feature 1..1199: note Artificial____HsIgE(1-18)_Ec(J96)-FimH(22-300)_Linker-PGDGN _Ec(J96)-FimG(24-37) mRNA opt1
  source 1..1199: mol_type = other RNA
aggagagtcccgcagtcggcgtccagcggctctgcttgttcgtgtgtgtgtcgttgcaggccttattcaagcttaccatggactggacctggatcctgttcctcgtggccgccgcgacccgcgtccacagcttcgcctgcaagacggccaacggcaccgccatccccatcgggggcgggtccgccaacgtgtacgtgaacctggcgccggtcgtgaacgtgggccagaacctggtcgtggacctcagcacccagatcttctgccacaacgactaccccgagaccatcacggactacgtgaccctgcagcgggggtccgcctacggcggcgtcctgagcaacttctccgggaccgtgaagtacagcggctccagctaccccttccccaccacgtccgagaccccgcgcgtggtctacaacagccggaccgacaagccctggcccgtggccctctacctgacccccgtgtccagcgccgggggcgtcgcgatcaaggccgggtccctgatcgccgtgctcatcctgcgccagacgaacaactacaacagcgacgacttccagttcgtgtggaacatctacgccaacaacgacgtcgtggtgccgaccggcggctgcgacgtctccgcccgggacgtgaccgtgaccctgcccgactaccccgggagcgtccccatcccgctcacggtgtactgcgcgaagtcccagaacctgggctactacctgagcgggaccaccgccgacgccggcaactccatcttcaccaacacggccagcttcagccccgcccagggcgtcggggtgcagctcacccgcaacggcaccatcatccccgcgaacaacaccgtgtccctgggggccgtcggcacgagcgccgtgtccctggggctcaccgccaactacgcccggaccggcggccaggtgaccgcggggaacgtccagagcatcatcggcgtgacgttcgtgtaccagcccggggacggcaacgccgacgtcaccatcaccgtgaacgggaaggtggtcgccaagtgaggactagtccctgttcccagagcccacttttttttctttttttgaaataaaatagcctgtctttcagatctaaaaaaaaaaaaaaaaaaaaaaaaaaaaaaaaaaaaaaaaaaaaaaaaaaaaaaaaaaaaaaaaaaaaaaaaaaaaaaaaaaaaaaaaaaaaaaaaaaaa

SEQ ID NO: 1003 - RNA, 1205 nt, synthetic construct
  misc_feature 1..1205: note Artificial____HsIgE(1-18)_Ec(J96)-FimH(22-300)_Linker-G4SGG _Ec(J96)-FimG(24-37) mRNA opt1
  source 1..1205: mol_type = other RNA
aggagagtcccgcagtcggcgtccagcggctctgcttgttcgtgtgtgtgtcgttgcaggccttattcaagcttaccatggactggacctggatcctgttcctcgtggccgccgcgacccgcgtccacagcttcgcctgcaagacggccaacggcaccgccatccccatcgggggcgggtccgccaacgtgtacgtgaacctggcgccggtcgtgaacgtgggccagaacctggtcgtggacctcagcacccagatcttctgccacaacgactaccccgagaccatcacggactacgtgaccctgcagcgggggtccgcctacggcggcgtcctgagcaacttctccgggaccgtgaagtacagcggctccagctaccccttccccaccacgtccgagaccccgcgcgtggtctacaacagccggaccgacaagccctggcccgtggccctctacctgacccccgtgtccagcgccgggggcgtcgcgatcaaggccgggtccctgatcgccgtgctcatcctgcgccagacgaacaactacaacagcgacgacttccagttcgtgtggaacatctacgccaacaacgacgtcgtggtgccgaccggcggctgcgacgtctccgcccgggacgtgaccgtgaccctgcccgactaccccgggagcgtccccatcccgctcacggtgtactgcgcgaagtcccagaacctgggctactacctgagcgggaccaccgccgacgccggcaactccatcttcaccaacacggccagcttcagccccgcccagggcgtcggggtgcagctcacccgcaacggcaccatcatccccgcgaacaacaccgtgtccctgggggccgtcggcacgagcgccgtgtccctggggctcaccgccaactacgcccggaccggcggccaggtgaccgcggggaacgtccagagcatcatcggcgtgacgttcgtgtaccagggcgggggcgggtccggcggggccgacgtcaccatcaccgtgaacggcaaggtggtcgccaagtgaggactagtccctgttcccagagcccacttttttttctttttttgaaataaaatagcctgtctttcagatctaaaaaaaaaaaaaaaaaaaaaaaaaaaaaaaaaaaaaaaaaaaaaaaaaaaaaaaaaaaaaaaaaaaaaaaaaaaaaaaaaaaaaaaaaaaaaaaaaaaa

SEQ ID NO: 1004 - RNA, 1205 nt, synthetic construct
  misc_feature 1..1205: note Artificial____MmIgK(1-20)_Ec(J96)-FimH(22-300)_Linker-PGDGN _Ec(J96)-FimG(24-37) mRNA opt1
  source 1..1205: mol_type = other RNA
aggagagtcccgcagtcggcgtccagcggctctgcttgttcgtgtgtgtgtcgttgcaggccttattcaagcttaccatggagaccgacaccctgctcctgtgggtgctgctcctgtgggtccccggcagcacggggttcgcctgcaagaccgccaacggcaccgcgatcccgatcgggggcgggtccgccaacgtgtacgtgaacctggcccccgtcgtgaacgtgggccagaacctcgtcgtggacctgagcacccagatcttctgccacaacgactaccccgagacgatcaccgactacgtgaccctgcagcgcggctccgcctacgggggcgtcctcagcaacttctccgggaccgtgaagtacagcggctccagctaccccttcccgacgacctccgagacgccccgggtggtctacaacagccgcaccgacaagccctggcccgtggccctgtacctgaccccggtgtccagcgccgggggcgtcgcgatcaaggccggctccctcatcgccgtgctgatcctgcggcagaccaacaactacaacagcgacgacttccagttcgtgtggaacatctacgcgaacaacgacgtcgtggtgcccaccgggggctgcgacgtctccgcccgcgacgtgaccgtgacgctccccgactaccccgggagcgtcccgatccccctgaccgtgtactgcgccaagtcccagaacctgggctactacctcagcggcaccaccgccgacgccgggaactccatcttcacgaacaccgcgagcttcagccccgcccagggcgtcggggtgcagctgacccggaacggcaccatcatccccgccaacaacacggtgtccctgggggccgtcggcaccagcgccgtgtccctcggcctgaccgcgaactacgcccgcaccgggggccaggtgacggccgggaacgtccagagcatcatcggcgtgaccttcgtgtaccagccgggggacggcaacgccgacgtcaccatcaccgtgaacggcaaggtggtcgccaagtgaggactagtccctgttcccagagcccacttttttttctttttttgaaataaaatagcctgtctttcagatctaaaaaaaaaaaaaaaaaaaaaaaaaaaaaaaaaaaaaaaaaaaaaaaaaaaaaaaaaaaaaaaaaaaaaaaaaaaaaaaaaaaaaaaaaaaaaaaaaaaa

SEQ ID NO: 1005 - RNA, 1205 nt, synthetic construct
  misc_feature 1..1205: note Artificial____MmIgK(1-20)_Ec(536)-FimH(22-300)_Linker-PGDGN _Ec(J96)-FimG(24-37) mRNA opt1
  source 1..1205: mol_type = other RNA
aggagagtcccgcagtcggcgtccagcggctctgcttgttcgtgtgtgtgtcgttgcaggccttattcaagcttaccatggagaccgacaccctgctcctgtgggtgctgctcctgtgggtccccggcagcacggggttcgcctgcaagaccgccaacggcaccgcgatcccgatcgggggcgggtccgccaacgtgtacgtgaacctggcccccgccgtcaacgtgggccagaacctcgtggtcgacctgagcacccagatcttctgccacaacgactaccccgagacgatcaccgactacgtgaccctgcagcgcggctccgcctacgggggcgtgctcagctccttcagcgggaccgtcaagtacaacggctccagctaccccttcccgacgacctccgagacgccccgggtggtgtacaacagccgcaccgacaagccctggcccgtcgcgctgtacctgaccccggtgtccagcgccgggggcgtggccatcaaggccggctccctcatcgcggtcctgatcctgcggcagaccaacaactacaacagcgacgacttccagttcgtgtggaacatctacgccaacaacgacgtggtcgtgcccaccgggggctgcgacgtgtccgcccgcgacgtcaccgtgacgctccccgactaccccgggagcgtgccgatccccctgaccgtctactgcgccaagtcccagaacctgggctactacctcagcggcaccaccgccgacgcggggaactccatcttcacgaacaccgccagcttcagccccgcccagggcgtgggggtccagctgacccggaacggcaccatcatccccgccaacaacacggtgtccctgggggccgtgggcaccagcgcggtctccctcggcctgaccgccaactacgcccgcaccgggggccaggtgacggccgggaacgtgcagagcatcatcggcgtcaccttcgtgtaccagccgggggacggcaacgccgacgtgaccatcaccgtcaacggcaaggtggtggcgaagtgaggactagtccctgttcccagagcccacttttttttctttttttgaaataaaatagcctgtctttcagatctaaaaaaaaaaaaaaaaaaaaaaaaaaaaaaaaaaaaaaaaaaaaaaaaaaaaaaaaaaaaaaaaaaaaaaaaaaaaaaaaaaaaaaaaaaaaaaaaaaaa

SEQ ID NO: 1006 - RNA, 1229 nt, synthetic construct
  misc_feature 1..1229: note Artificial____HsIgE(1-18)_Ec(J96)-FimH(22-300)_Linker-(G4S) 3_Ec(J96)-FimC(135-148) mRNA opt1
  source 1..1229: mol_type = other RNA
aggagagtcccgcagtcggcgtccagcggctctgcttgttcgtgtgtgtgtcgttgcaggccttattcaagcttaccatggactggacctggatcctgttcctcgtggccgccgcgacccgcgtccacagcttcgcctgcaagacggccaacggcaccgccatccccatcgggggcgggtccgccaacgtgtacgtgaacctggcgccggtcgtgaacgtgggccagaacctggtcgtggacctcagcacccagatcttctgccacaacgactaccccgagaccatcacggactacgtgaccctgcagcgggggtccgcctacggcggcgtcctgagcaacttctccgggaccgtgaagtacagcggctccagctaccccttccccaccacgtccgagaccccgcgcgtggtctacaacagccggaccgacaagccctggcccgtggccctctacctgacccccgtgtccagcgccgggggcgtcgcgatcaaggccgggtccctgatcgccgtgctcatcctgcgccagacgaacaactacaacagcgacgacttccagttcgtgtggaacatctacgccaacaacgacgtcgtggtgccgaccggcggctgcgacgtctccgcccgggacgtgaccgtgaccctgcccgactaccccgggagcgtccccatcccgctcacggtgtactgcgcgaagtcccagaacctgggctactacctgagcgggaccaccgccgacgccggcaactccatcttcaccaacacggccagcttcagccccgcccagggcgtcggggtgcagctcacccgcaacggcaccatcatccccgcgaacaacaccgtgtccctgggggccgtcggcacgagcgccgtgtccctggggctcaccgccaactacgcccggaccggcggccaggtgaccgcggggaacgtccagagcatcatcggcgtgacgttcgtgtaccagggcgggggcgggtccggcgggggcgggagcggcgggggcggctccaccgagaacaccctgcagctggccatcatcagccgcatcaagtgaggactagtccctgttcccagagcccacttttttttctttttttgaaataaaatagcctgtctttcagatctaaaaaaaaaaaaaaaaaaaaaaaaaaaaaaaaaaaaaaaaaaaaaaaaaaaaaaaaaaaaaaaaaaaaaaaaaaaaaaaaaaaaaaaaaaaaaaaaaaaa

SEQ ID NO: 1007 - RNA, 1652 nt, synthetic construct
  misc_feature 1..1652: note Artificial____LumSynth(1-154_C37A_N102D)_Linker(GGS)4-GGG_E c(J96)-FimH(22-300)_Linker-PGDGN_Ec(J96)-FimG(24-37) mRNA opt1
  source 1..1652: mol_type = other RNA
aggagagtcccgcagtcggcgtccagcggctctgcttgttcgtgtgtgtgtcgttgcaggccttattcaagcttaccatgcagatctacgagggcaagctgaccgccgaggggctccgcttcggcatcgtggccagccggttcaaccacgcgctggtcgaccgcctggtggagggggccatcgacgccatcgtgcggcacggcgggcgcgaggaggacatcaccctcgtccgggtgcccggctcctgggagatcccggtggccgccggcgagctggcgcgcaaggaggacatcgacgccgtcatcgccatcggggtgctgatccggggcgccacgccccacttcgactacatcgcgagcgaggtgtccaaggggctcgccgacctgagcctggagctccgcaagcccatcaccttcggcgtcatcaccgccgacaccctggagcaggccatcgagcgggccgggacgaagcacggcaacaagggctgggaggcggccctgtccgccatcgagatggccaacctcttcaagagcctgcgcgggggctccgggggcagcggcgggtccggcgggagcggcgggggcttcgcctgcaagaccgcgaacggcaccgccatccccatcgggggcgggtccgccaacgtgtacgtgaacctggccccggtcgtgaacgtgggccagaacctcgtcgtggacctgagcacccagatcttctgccacaacgactaccccgagacgatcaccgactacgtgaccctgcagcgggggtccgcctacggcggcgtcctcagcaacttctccgggaccgtgaagtacagcggctccagctaccccttccccacgacctccgagaccccgcgcgtggtctacaacagccggaccgacaagccctggcccgtggcgctgtacctgacgcccgtgagctccgccgggggcgtcgccatcaaggccgggagcctcatcgccgtgctgatcctgcgccagaccaacaactacaactccgacgacttccagttcgtctggaacatctacgcgaacaacgacgtggtggtcccgaccggcggctgcgacgtgagcgcccgggacgtgaccgtcacgctccccgactaccccgggtccgtgcccatcccgctgaccgtgtactgcgccaagagccagaacctgggctactacctctccgggaccaccgccgacgcgggcaacagcatcttcacgaacaccgcctccttcagccccgcccagggcgtcggggtgcagctgacccgcaacggcaccatcatccccgccaacaacacggtgtccctgggggccgtcggcaccagcgcggtgtccctcgggctgaccgccaactacgcccggaccggcggccaggtgacggccgggaacgtccagagcatcatcggcgtgaccttcgtgtaccagcccggggacggcaacgccgacgtcaccatcaccgtgaacgggaaggtggtcgcgaagtgaggactagtccctgttcccagagcccacttttttttctttttttgaaataaaatagcctgtctttcagatctaaaaaaaaaaaaaaaaaaaaaaaaaaaaaaaaaaaaaaaaaaaaaaaaaaaaaaaaaaaaaaaaaaaaaaaaaaaaaaaaaaaaaaaaaaaaaaaaaaaa

SEQ ID NO: 1008 - RNA, 1670 nt, synthetic construct
  misc_feature 1..1670: note Artificial____HsIgE(1-18)_Ec(J96)-FimH(22-300)_Linker-PGDGN _Ec(J96)-FimG(24-37)_Linker-SGG_LumSynth(1-154_C37A_N102D) mRNA opt1
  source 1..1670: mol_type = other RNA
aggagagtcccgcagtcggcgtccagcggctctgcttgttcgtgtgtgtgtcgttgcaggccttattcaagcttaccatggactggacctggatcctgttcctcgtggccgccgcgacccgcgtccacagcttcgcctgcaagacggccaacggcaccgccatccccatcgggggcgggtccgccaacgtgtacgtgaacctggcgccggtcgtgaacgtgggccagaacctggtcgtggacctcagcacccagatcttctgccacaacgactaccccgagaccatcacggactacgtgaccctgcagcgggggtccgcctacggcggcgtcctgagcaacttctccgggaccgtgaagtacagcggctccagctaccccttccccaccacgtccgagaccccgcgcgtggtctacaacagccggaccgacaagccctggcccgtggccctctacctgacccccgtgtccagcgccgggggcgtcgcgatcaaggccgggtccctgatcgccgtgctcatcctgcgccagacgaacaactacaacagcgacgacttccagttcgtgtggaacatctacgccaacaacgacgtcgtggtgccgaccggcggctgcgacgtctccgcccgggacgtgaccgtgaccctgcccgactaccccgggagcgtccccatcccgctcacggtgtactgcgcgaagtcccagaacctgggctactacctgagcgggaccaccgccgacgccggcaactccatcttcaccaacacggccagcttcagccccgcccagggcgtcggggtgcagctcacccgcaacggcaccatcatccccgcgaacaacaccgtgtccctgggggccgtcggcacgagcgccgtgtccctggggctcaccgccaactacgcccggaccggcggccaggtgaccgcggggaacgtccagagcatcatcggcgtgacgttcgtgtaccagcccggggacggcaacgccgacgtcaccatcaccgtgaacgggaaggtggtcgccaagtccggcggcatgcagatctacgaggggaagctgaccgccgagggcctgcgcttcgggatcgtggccagccggttcaaccacgcgctcgtggaccgcctggtcgagggcgccatcgacgccatcgtgcggcacgggggccgcgaggaggacatcacgctggtgcgggtcccgggctcctgggagatccccgtggccgcgggggagctcgcccgcaaggaggacatcgacgccgtgatcgccatcggcgtcctgatccgcggggccacgccccacttcgactacatcgcgagcgaggtgtccaagggcctggccgacctcagcctggagctgcggaagcccatcaccttcggcgtgatcaccgccgacaccctcgagcaggccatcgagcgggccgggaccaagcacggcaacaaggggtgggaggcggccctgtccgccatcgagatggccaacctgttcaagagcctccgctgaggactagtccctgttcccagagcccacttttttttctttttttgaaataaaatagcctgtctttcagatctaaaaaaaaaaaaaaaaaaaaaaaaaaaaaaaaaaaaaaaaaaaaaaaaaaaaaaaaaaaaaaaaaaaaaaaaaaaaaaaaaaaaaaaaaaaaaaaaaaaa

SEQ ID NO: 1009 - RNA, 1697 nt, synthetic construct
  misc_feature 1..1697: note Artificial____HsIgE(1-18)_Ec(J96)-FimH(22-300)_Linker-PGDGN _Ec(J96)-FimG(24-37)_Linker-SGG_Ferritin(5-167_N19Q) mRNA opt1
  source 1..1697: mol_type = other RNA
aggagagtcccgcagtcggcgtccagcggctctgcttgttcgtgtgtgtgtcgttgcaggccttattcaagcttaccatggactggacctggatcctgttcctcgtggccgccgcgacccgcgtccacagcttcgcctgcaagacggccaacggcaccgccatccccatcgggggcgggtccgccaacgtgtacgtgaacctggcgccggtcgtgaacgtgggccagaacctggtcgtggacctcagcacccagatcttctgccacaacgactaccccgagaccatcacggactacgtgaccctgcagcgggggtccgcctacggcggcgtcctgagcaacttctccgggaccgtgaagtacagcggctccagctaccccttccccaccacgtccgagaccccgcgcgtggtctacaacagccggaccgacaagccctggcccgtggccctctacctgacccccgtgtccagcgccgggggcgtcgcgatcaaggccgggtccctgatcgccgtgctcatcctgcgccagacgaacaactacaacagcgacgacttccagttcgtgtggaacatctacgccaacaacgacgtcgtggtgccgaccggcggctgcgacgtctccgcccgggacgtgaccgtgaccctgcccgactaccccgggagcgtccccatcccgctcacggtgtactgcgcgaagtcccagaacctgggctactacctgagcgggaccaccgccgacgccggcaactccatcttcaccaacacggccagcttcagccccgcccagggcgtcggggtgcagctcacccgcaacggcaccatcatccccgcgaacaacaccgtgtccctgggggccgtcggcacgagcgccgtgtccctggggctcaccgccaactacgcccggaccggcggccaggtgaccgcggggaacgtccagagcatcatcggcgtgacgttcgtgtaccagcccggggacggcaacgccgacgtcaccatcaccgtgaacgggaaggtggtcgccaagtccggcggcgacatcatcaagctgctgaacgagcaggtcaacaaggagatgcagagctccaacctctacatgagcatgtccagctggtgctacacccactccctggacggggccggcctgttcctcttcgaccacgccgcggaggagtacgagcacgccaagaagctgatcatcttcctgaacgagaacaacgtgccggtgcagctcacgagcatctccgcccccgagcacaagttcgaggggctgacccagatcttccagaaggcctacgagcacgagcagcacatcagcgagtccatcaacaacatcgtggaccacgcgatcaagagcaaggaccacgccaccttcaacttcctgcagtggtacgtggccgagcagcacgaggaggaggtcctcttcaaggacatcctggacaagatcgagctgatcggcaacgagaaccacgggctctacctggccgaccagtacgtgaagggcatcgccaagtcccgcaagagctgaggactagtccctgttcccagagcccacttttttttctttttttgaaataaaatagcctgtctttcagatctaaaaaaaaaaaaaaaaaaaaaaaaaaaaaaaaaaaaaaaaaaaaaaaaaaaaaaaaaaaaaaaaaaaaaaaaaaaaaaaaaaaaaaaaaaaaaaaaaaaa

SEQ ID NO: 1010 - RNA, 1727 nt, synthetic construct
  misc_feature 1..1727: note Artificial____MmIgK(1-20)_Ec(J96)-FimH(22-300)_Linker-PGDGN _Ec(J96)-FimG(24-37)_Linker-(GGS)4_Ferritin(5-166) mRNA opt1
  source 1..1727: mol_type = other RNA
aggagagtcccgcagtcggcgtccagcggctctgcttgttcgtgtgtgtgtcgttgcaggccttattcaagcttaccatggagaccgacaccctgctcctgtgggtgctgctcctgtgggtccccggcagcacggggttcgcctgcaagaccgccaacggcaccgcgatcccgatcgggggcgggtccgccaacgtgtacgtgaacctggcccccgtcgtgaacgtgggccagaacctcgtcgtggacctgagcacccagatcttctgccacaacgactaccccgagacgatcaccgactacgtgaccctgcagcgcggctccgcctacgggggcgtcctcagcaacttctccgggaccgtgaagtacagcggctccagctaccccttcccgacgacctccgagacgccccgggtggtctacaacagccgcaccgacaagccctggcccgtggccctgtacctgaccccggtgtccagcgccgggggcgtcgcgatcaaggccggctccctcatcgccgtgctgatcctgcggcagaccaacaactacaacagcgacgacttccagttcgtgtggaacatctacgcgaacaacgacgtcgtggtgcccaccgggggctgcgacgtctccgcccgcgacgtgaccgtgacgctccccgactaccccgggagcgtcccgatccccctgaccgtgtactgcgccaagtcccagaacctgggctactacctcagcggcaccaccgccgacgccgggaactccatcttcacgaacaccgcgagcttcagccccgcccagggcgtcggggtgcagctgacccggaacggcaccatcatccccgccaacaacacggtgtccctgggggccgtcggcaccagcgccgtgtccctcggcctgaccgcgaactacgcccgcaccgggggccaggtgacggccgggaacgtccagagcatcatcggcgtgaccttcgtgtaccagccgggggacggcaacgccgacgtcaccatcaccgtgaacggcaaggtggtcgccaagggcgggtccgggggcagcgggggctccggcgggagcgacatcatcaagctgctcaacgagcaggtcaacaaggagatgaactccagcaacctgtacatgtccatgagctcctggtgctacacgcacagcctggacggcgcgggcctcttcctgttcgaccacgccgccgaggagtacgagcacgccaagaagctgatcatcttcctcaacgagaacaacgtgcccgtgcagctgacctccatcagcgcccccgagcacaagttcgaggggctgacccagatcttccagaaggcgtacgagcacgagcagcacatctccgagagcatcaacaacatcgtggaccacgccatcaagtccaaggaccacgccaccttcaacttcctccagtggtacgtggccgagcagcacgaggaggaggtcctgttcaaggacatcctggacaagatcgagctcatcggcaacgagaaccacgggctgtacctggcggaccagtacgtgaagggcatcgccaagagccggaagtgaggactagtccctgttcccagagcccacttttttttctttttttgaaataaaatagcctgtctttcagatctaaaaaaaaaaaaaaaaaaaaaaaaaaaaaaaaaaaaaaaaaaaaaaaaaaaaaaaaaaaaaaaaaaaaaaaaaaaaaaaaaaaaaaaaaaaaaaaaaaaa

SEQ ID NO: 1011 - RNA, 1370 nt, synthetic construct
  misc_feature 1..1370: note Artificial____HsIgE(1-18)_Ec(J96)-FimH(22-300)_Linker-PGDGN _Ec(J96)-FimG(24-37)_TMdomain-HA(510-566) mRNA opt1
  source 1..1370: mol_type = other RNA
aggagagtcccgcagtcggcgtccagcggctctgcttgttcgtgtgtgtgtcgttgcaggccttattcaagcttaccatggactggacctggatcctgttcctcgtggccgccgcgacccgcgtccacagcttcgcctgcaagacggccaacggcaccgccatccccatcgggggcgggtccgccaacgtgtacgtgaacctggcgccggtcgtgaacgtgggccagaacctggtcgtggacctcagcacccagatcttctgccacaacgactaccccgagaccatcacggactacgtgaccctgcagcgggggtccgcctacggcggcgtcctgagcaacttctccgggaccgtgaagtacagcggctccagctaccccttccccaccacgtccgagaccccgcgcgtggtctacaacagccggaccgacaagccctggcccgtggccctctacctgacccccgtgtccagcgccgggggcgtcgcgatcaaggccgggtccctgatcgccgtgctcatcctgcgccagacgaacaactacaacagcgacgacttccagttcgtgtggaacatctacgccaacaacgacgtcgtggtgccgaccggcggctgcgacgtctccgcccgggacgtgaccgtgaccctgcccgactaccccgggagcgtccccatcccgctcacggtgtactgcgcgaagtcccagaacctgggctactacctgagcgggaccaccgccgacgccggcaactccatcttcaccaacacggccagcttcagccccgcccagggcgtcggggtgcagctcacccgcaacggcaccatcatccccgcgaacaacaccgtgtccctgggggccgtcggcacgagcgccgtgtccctggggctcaccgccaactacgcccggaccggcggccaggtgaccgcggggaacgtccagagcatcatcggcgtgacgttcgtgtaccagcccggggacggcaacgccgacgtcaccatcaccgtgaacgggaaggtggtcgccaaggccaagctgaaccgcgaggagatcgacggcgtgaagctggagtccacccggatctaccagatcctcgccatctacagcacggtggcgtccagcctggtcctggtggtgtccctcggcgccatcagcttctggatgtgctccaacgggagcctgcagtgccgcatctgcatctgaggactagtccctgttcccagagcccacttttttttctttttttgaaataaaatagcctgtctttcagatctaaaaaaaaaaaaaaaaaaaaaaaaaaaaaaaaaaaaaaaaaaaaaaaaaaaaaaaaaaaaaaaaaaaaaaaaaaaaaaaaaaaaaaaaaaaaaaaaaaaa

SEQ ID NO: 1012 - RNA, 1703 nt, synthetic construct
  misc_feature 1..1703: note Artificial____HsIgE(1-18)_LumSynth(1-154_C37A_N102D)_Linker (GGS)4-GGG_Ec(J96)-FimH(22-300)_Linker-PGDGN_Ec(J96)-FimG(2 4-37) mRNA opt1
  source 1..1703: mol_type = other RNA
aggagagtcccgcagtcggcgtccagcggctctgcttgttcgtgtgtgtgtcgttgcaggccttattcaagcttaccatggactggacctggatcctgttcctcgtggccgccgcgacccgcgtccacagccagatctacgagggcaagctgacggccgaggggctgcggttcggcatcgtggcctcccgcttcaaccacgccctcgtggaccggctggtcgagggggccatcgacgcgatcgtgcgccacggcgggcgggaggaggacatcaccctggtgcgcgtccccggcagctgggagatcccggtggccgccggcgagctcgcccggaaggaggacatcgacgcggtgatcgccatcggggtcctgatccgcggcgccacgccccacttcgactacatcgcctccgaggtgagcaaggggctggccgacctctccctggagctgcggaagcccatcaccttcggcgtgatcaccgcggacaccctcgagcaggccatcgagcgcgccgggaccaagcacggcaacaagggctgggaggccgccctgagcgcgatcgagatggccaacctgttcaagtccctccgcgggggcagcgggggctccggcgggagcggcgggtccggcgggggcttcgcctgcaagaccgccaacggcacggccatccccatcgggggcgggagcgcgaacgtctacgtgaacctggccccggtggtcaacgtgggccagaacctggtggtcgacctctccacccagatcttctgccacaacgactaccccgagaccatcaccgactacgtgacgctgcagcgggggagcgcctacggcggcgtgctgtccaacttcagcgggaccgtcaagtactccggcagctcctaccccttccccaccaccagcgagacgccgcgggtggtgtacaacagccgcaccgacaagccctggcccgtcgccctctacctgacccccgtgtccagcgccgggggcgtcgcgatcaaggccgggtccctgatcgccgtgctcatcctgcggcagaccaacaactacaacagcgacgacttccagttcgtgtggaacatctacgccaacaacgacgtcgtggtgccgacgggcggctgcgacgtctccgcgcgcgacgtgaccgtgaccctgcccgactaccccgggagcgtccccatcccgctcaccgtgtactgcgccaagtcccagaacctgggctactacctgagcgggacgaccgccgacgccggcaactccatcttcaccaacaccgccagcttctcccccgcgcagggcgtgggggtccagctcacgcggaacggcaccatcatccccgccaacaacaccgtgagcctgggggccgtgggcacctccgccgtcagcctggggctcacggccaactacgcgcgcaccggcggccaggtgaccgccgggaacgtgcagtccatcatcggcgtcaccttcgtgtaccagcccggggacggcaacgccgacgtgacgatcaccgtcaacgggaaggtggtggccaagtgaggactagtccctgttcccagagcccacttttttttctttttttgaaataaaatagcctgtctttcagatctaaaaaaaaaaaaaaaaaaaaaaaaaaaaaaaaaaaaaaaaaaaaaaaaaaaaaaaaaaaaaaaaaaaaaaaaaaaaaaaaaaaaaaaaaaaaaaaaaaaa

SEQ ID NO: 1013 - RNA, 1670 nt, synthetic construct
  misc_feature 1..1670: note Artificial____HsIgE(1-18)_Ec(J96)-FimH(22-300_N28S_N91S_N24 9Q)_Linker-PGDGN_Ec(J96)-FimG(24-37)_Linker-SGG_LumSynth(1- 154_C37A_N102D) mRNA opt1
  source 1..1670: mol_type = other RNA
aggagagtcccgcagtcggcgtccagcggctctgcttgttcgtgtgtgtgtcgttgcaggccttattcaagcttaccatggactggacctggatcctgttcctcgtggccgccgcgacccgcgtccacagcttcgcctgcaagacggcctccggcaccgccatccccatcgggggcgggagcgccaacgtgtacgtgaacctggcgccggtcgtgaacgtgggccagaacctggtcgtggacctctccacccagatcttctgccacaacgactaccccgagaccatcacggactacgtgaccctgcagcgggggagcgcctacggcggcgtcctgtccagcttctccgggaccgtgaagtacagcggctccagctaccccttccccaccacgtccgagaccccgcgcgtggtctacaacagccggaccgacaagccctggcccgtggccctctacctgacccccgtgtccagcgccgggggcgtcgcgatcaaggccgggtccctgatcgccgtgctcatcctgcgccagacgaacaactacaacagcgacgacttccagttcgtgtggaacatctacgccaacaacgacgtcgtggtgccgaccggcggctgcgacgtctccgcccgggacgtgaccgtgaccctgcccgactaccccgggagcgtccccatcccgctcacggtgtactgcgcgaagtcccagaacctgggctactacctgagcgggaccaccgccgacgccggcaacagcatcttcaccaacacggcctccttcagccccgcccagggcgtcggggtgcagctcacccgccagggcaccatcatccccgcgaacaacaccgtgtccctgggggccgtcggcacgagcgccgtgtccctggggctcaccgccaactacgcccggaccggcggccaggtgaccgcggggaacgtccagagcatcatcggcgtgacgttcgtgtaccagcccggggacggcaacgccgacgtcaccatcaccgtgaacgggaaggtggtcgccaagtccggcggcatgcagatctacgaggggaagctgaccgccgagggcctgcgcttcgggatcgtggccagccggttcaaccacgcgctcgtggaccgcctggtcgagggcgccatcgacgccatcgtgcggcacgggggccgcgaggaggacatcacgctggtgcgggtcccgggctcctgggagatccccgtggccgcgggggagctcgcccgcaaggaggacatcgacgccgtgatcgccatcggcgtcctgatccgcggggccacgccccacttcgactacatcgcgagcgaggtgtccaagggcctggccgacctcagcctggagctgcggaagcccatcaccttcggcgtgatcaccgccgacaccctcgagcaggccatcgagcgggccgggaccaagcacggcaacaaggggtgggaggcggccctgtccgccatcgagatggccaacctgttcaagagcctccgctgaggactagtccctgttcccagagcccacttttttttctttttttgaaataaaatagcctgtctttcagatctaaaaaaaaaaaaaaaaaaaaaaaaaaaaaaaaaaaaaaaaaaaaaaaaaaaaaaaaaaaaaaaaaaaaaaaaaaaaaaaaaaaaaaaaaaaaaaaaaaaa

SEQ ID NO: 1014 - RNA, 1670 nt, synthetic construct
  misc_feature 1..1670: note Artificial____HsIgE(1-18)_Ec(J96)-FimH(22-300_N28S_N91S_N24 9Q_N256D)_Linker-PGDGN_Ec(J96)-FimG(24-37)_Linker-SGG_LumSy nth(1-154_C37A_N102D) mRNA opt1
  source 1..1670: mol_type = other RNA
aggagagtcccgcagtcggcgtccagcggctctgcttgttcgtgtgtgtgtcgttgcaggccttattcaagcttaccatggactggacctggatcctgttcctcgtggccgccgcgacccgcgtccacagcttcgcctgcaagacggcctccggcaccgccatccccatcgggggcgggagcgccaacgtgtacgtgaacctggcgccggtcgtgaacgtgggccagaacctggtcgtggacctctccacccagatcttctgccacaacgactaccccgagaccatcacggactacgtgaccctgcagcgggggagcgcctacggcggcgtcctgtccagcttctccgggaccgtgaagtacagcggctccagctaccccttccccaccacgtccgagaccccgcgcgtggtctacaacagccggaccgacaagccctggcccgtggccctctacctgacccccgtgtccagcgccgggggcgtcgcgatcaaggccgggtccctgatcgccgtgctcatcctgcgccagacgaacaactacaacagcgacgacttccagttcgtgtggaacatctacgccaacaacgacgtcgtggtgccgaccggcggctgcgacgtctccgcccgggacgtgaccgtgaccctgcccgactaccccgggagcgtccccatcccgctcacggtgtactgcgcgaagtcccagaacctgggctactacctgagcgggaccaccgccgacgccggcaacagcatcttcaccaacacggcctccttcagccccgcccagggcgtcggggtgcagctcacccgccagggcaccatcatccccgcggacaacaccgtgtccctgggggccgtcggcacgagcgccgtgtccctggggctcaccgccaactacgcccggaccggcggccaggtgaccgcggggaacgtccagagcatcatcggcgtgacgttcgtgtaccagcccggggacggcaacgccgacgtcaccatcaccgtgaacgggaaggtggtcgccaagtccggcggcatgcagatctacgaggggaagctgaccgccgagggcctgcgcttcgggatcgtggccagccggttcaaccacgcgctcgtggaccgcctggtcgagggcgccatcgacgccatcgtgcggcacgggggccgcgaggaggacatcacgctggtgcgggtcccgggctcctgggagatccccgtggccgcgggggagctcgcccgcaaggaggacatcgacgccgtgatcgccatcggcgtcctgatccgcggggccacgccccacttcgactacatcgcgagcgaggtgtccaagggcctggccgacctcagcctggagctgcggaagcccatcaccttcggcgtgatcaccgccgacaccctcgagcaggccatcgagcgggccgggaccaagcacggcaacaaggggtgggaggcggccctgtccgccatcgagatggccaacctgttcaagagcctccgctgaggactagtccctgttcccagagcccacttttttttctttttttgaaataaaatagcctgtctttcagatctaaaaaaaaaaaaaaaaaaaaaaaaaaaaaaaaaaaaaaaaaaaaaaaaaaaaaaaaaaaaaaaaaaaaaaaaaaaaaaaaaaaaaaaaaaaaaaaaaaaa

SEQ ID NO: 1015 - RNA, 1670 nt, synthetic construct
  misc_feature 1..1670: note Artificial____HsIgE(1-18)_Ec(J96)-FimH(22-300_N28S_V48C_L55 C_N91S_N249Q)_Linker-PGDGN_Ec(J96)-FimG(24-37)_Linker-SGG_L umSynth(1-154_C37A_N102D) mRNA opt1
  source 1..1670: mol_type = other RNA
aggagagtcccgcagtcggcgtccagcggctctgcttgttcgtgtgtgtgtcgttgcaggccttattcaagcttaccatggactggacctggatcctgttcctcgtggccgccgcgacccgcgtccacagcttcgcctgcaagacggcctccggcaccgccatccccatcgggggcgggagcgccaacgtgtacgtgaacctggcgccgtgcgtcaacgtgggccagaactgcgtggtcgacctgtccacccagatcttctgccacaacgactaccccgagaccatcacggactacgtgaccctccagcgggggagcgcctacggcggcgtgctgtccagcttctccgggaccgtcaagtacagcggctccagctaccccttccccaccacgtccgagaccccgcgcgtggtgtacaacagccggaccgacaagccctggcccgtcgccctgtacctcacccccgtgtccagcgccgggggcgtggcgatcaaggccgggtccctgatcgccgtcctgatcctccgccagacgaacaactacaacagcgacgacttccagttcgtgtggaacatctacgccaacaacgacgtggtcgtgccgaccggcggctgcgacgtgtccgcccgggacgtcaccgtgaccctgcccgactaccccgggagcgtgcccatcccgctgacggtctactgcgcgaagtcccagaacctcggctactacctgagcgggaccaccgccgacgccggcaacagcatcttcaccaacacggcctccttcagccccgcccagggcgtgggggtccagctgacccgccagggcaccatcatccccgcgaacaacaccgtgtccctcggggccgtgggcacgagcgccgtctccctggggctgaccgccaactacgcccggaccggcggccaggtgaccgcggggaacgtgcagagcatcatcggcgtcacgttcgtgtaccagcccggggacggcaacgccgacgtgaccatcaccgtcaacgggaaggtggtggccaagtccggcggcatgcagatctacgaggggaagctcaccgccgagggcctgcgcttcgggatcgtcgccagccggttcaaccacgcgctggtggaccgcctcgtggagggcgccatcgacgccatcgtccggcacgggggccgcgaggaggacatcacgctggtgcgggtgccgggctcctgggagatccccgtcgccgcgggggagctggcccgcaaggaggacatcgacgccgtgatcgccatcggcgtgctcatccgcggggccacgccccacttcgactacatcgcgagcgaggtctccaagggcctggccgacctgagcctcgagctgcggaagcccatcaccttcggcgtgatcaccgccgacaccctggagcaggccatcgagcgggccgggaccaagcacggcaacaaggggtgggaggcggccctctccgccatcgagatggccaacctgttcaagagcctgcgctgaggactagtccctgttcccagagcccacttttttttctttttttgaaataaaatagcctgtctttcagatctaaaaaaaaaaaaaaaaaaaaaaaaaaaaaaaaaaaaaaaaaaaaaaaaaaaaaaaaaaaaaaaaaaaaaaaaaaaaaaaaaaaaaaaaaaaaaaaaaaaa

SEQ ID NO: 1016 - RNA, 1670 nt, synthetic construct
  misc_feature 1..1670: note Artificial____HsIgE(1-18)_Ec(J96)-FimH(22-300_F165V)_Linker -PGDGN_Ec(J96)-FimG(24-37)_Linker-SGG_LumSynth(1-154_C37A_N 102D) mRNA opt1
  source 1..1670: mol_type = other RNA
aggagagtcccgcagtcggcgtccagcggctctgcttgttcgtgtgtgtgtcgttgcaggccttattcaagcttaccatggactggacctggatcctgttcctcgtggccgccgcgacccgcgtccacagcttcgcctgcaagacggccaacggcaccgccatccccatcgggggcgggtccgccaacgtgtacgtgaacctggcgccggtcgtgaacgtgggccagaacctggtcgtggacctcagcacccagatcttctgccacaacgactaccccgagaccatcacggactacgtgaccctgcagcgggggtccgcctacggcggcgtcctgagcaacttctccgggaccgtgaagtacagcggctccagctaccccttccccaccacgtccgagaccccgcgcgtggtctacaacagccggaccgacaagccctggcccgtggccctctacctgacccccgtgtccagcgccgggggcgtcgcgatcaaggccgggtccctgatcgccgtgctcatcctgcgccagacgaacaactacaacagcgacgacttccaggtggtctggaacatctacgccaacaacgacgtggtggtcccgaccggcggctgcgacgtgtccgcccgggacgtgaccgtcaccctgcccgactaccccgggagcgtgcccatcccgctcacggtctactgcgcgaagtcccagaacctgggctactacctgagcgggaccaccgccgacgccggcaactccatcttcaccaacacggccagcttcagccccgcccagggcgtgggggtgcagctcacccgcaacggcaccatcatccccgcgaacaacaccgtctccctgggggccgtgggcacgagcgccgtgtccctggggctcaccgccaactacgcccggaccggcggccaggtcaccgcggggaacgtgcagagcatcatcggcgtgacgttcgtctaccagcccggggacggcaacgccgacgtgaccatcaccgtgaacgggaaggtcgtggccaagtccggcggcatgcagatctacgaggggaagctgaccgccgagggcctgcgcttcgggatcgtggccagccggttcaaccacgcgctcgtcgaccgcctggtggagggcgccatcgacgccatcgtgcggcacgggggccgcgaggaggacatcacgctggtccgggtgccgggctcctgggagatccccgtggccgcgggggagctcgcccgcaaggaggacatcgacgccgtcatcgccatcggcgtgctgatccgcggggccacgccccacttcgactacatcgcgagcgaggtgtccaagggcctggccgacctcagcctggagctgcggaagcccatcaccttcggcgtcatcaccgccgacaccctcgagcaggccatcgagcgggccgggaccaagcacggcaacaaggggtgggaggcggccctgtccgccatcgagatggccaacctgttcaagagcctccgctgaggactagtccctgttcccagagcccacttttttttctttttttgaaataaaatagcctgtctttcagatctaaaaaaaaaaaaaaaaaaaaaaaaaaaaaaaaaaaaaaaaaaaaaaaaaaaaaaaaaaaaaaaaaaaaaaaaaaaaaaaaaaaaaaaaaaaaaaaaaaaa

SEQ ID NO: 1017 - RNA, 1697 nt, synthetic construct
  misc_feature 1..1697: note Artificial____HsIgE(1-18)_Ec(J96)-FimH(22-300_N28S_N91S_N24 9Q)_Linker-PGDGN_Ec(J96)-FimG(24-37)_Linker-SGG_Ferritin(5- 167_N19Q) mRNA opt1
  source 1..1697: mol_type = other RNA
aggagagtcccgcagtcggcgtccagcggctctgcttgttcgtgtgtgtgtcgttgcaggccttattcaagcttaccatggactggacctggatcctgttcctcgtggccgccgcgacccgcgtccacagcttcgcctgcaagacggcctccggcaccgccatccccatcgggggcgggagcgccaacgtgtacgtgaacctggcgccggtcgtgaacgtgggccagaacctggtcgtggacctctccacccagatcttctgccacaacgactaccccgagaccatcacggactacgtgaccctgcagcgggggagcgcctacggcggcgtcctgtccagcttctccgggaccgtgaagtacagcggctccagctaccccttccccaccacgtccgagaccccgcgcgtggtctacaacagccggaccgacaagccctggcccgtggccctctacctgacccccgtgtccagcgccgggggcgtcgcgatcaaggccgggtccctgatcgccgtgctcatcctgcgccagacgaacaactacaacagcgacgacttccagttcgtgtggaacatctacgccaacaacgacgtcgtggtgccgaccggcggctgcgacgtctccgcccgggacgtgaccgtgaccctgcccgactaccccgggagcgtccccatcccgctcacggtgtactgcgcgaagtcccagaacctgggctactacctgagcgggaccaccgccgacgccggcaacagcatcttcaccaacacggcctccttcagccccgcccagggcgtcggggtgcagctcacccgccagggcaccatcatccccgcgaacaacaccgtgtccctgggggccgtcggcacgagcgccgtgtccctggggctcaccgccaactacgcccggaccggcggccaggtgaccgcggggaacgtccagagcatcatcggcgtgacgttcgtgtaccagcccggggacggcaacgccgacgtcaccatcaccgtgaacgggaaggtggtcgccaagtccggcggcgacatcatcaagctgctgaacgagcaggtcaacaaggagatgcagagctccaacctctacatgagcatgtccagctggtgctacacccactccctggacggggccggcctgttcctcttcgaccacgccgcggaggagtacgagcacgccaagaagctgatcatcttcctgaacgagaacaacgtgccggtgcagctcacgagcatctccgcccccgagcacaagttcgaggggctgacccagatcttccagaaggcctacgagcacgagcagcacatcagcgagtccatcaacaacatcgtggaccacgcgatcaagagcaaggaccacgccaccttcaacttcctgcagtggtacgtggccgagcagcacgaggaggaggtcctcttcaaggacatcctggacaagatcgagctgatcggcaacgagaaccacgggctctacctggccgaccagtacgtgaagggcatcgccaagtcccgcaagagctgaggactagtccctgttcccagagcccacttttttttctttttttgaaataaaatagcctgtctttcagatctaaaaaaaaaaaaaaaaaaaaaaaaaaaaaaaaaaaaaaaaaaaaaaaaaaaaaaaaaaaaaaaaaaaaaaaaaaaaaaaaaaaaaaaaaaaaaaaaaaaa

SEQ ID NO: 1018 - RNA, 1697 nt, synthetic construct
  misc_feature 1..1697: note Artificial____HsIgE(1-18)_Ec(J96)-FimH(22-300_N28S_N91S_N24 9Q_N256D)_Linker-PGDGN_Ec(J96)-FimG(24-37)_Linker-SGG_Ferri tin(5-167_N19Q) mRNA opt1
  source 1..1697: mol_type = other RNA
aggagagtcccgcagtcggcgtccagcggctctgcttgttcgtgtgtgtgtcgttgcaggccttattcaagcttaccatggactggacctggatcctgttcctcgtggccgccgcgacccgcgtccacagcttcgcctgcaagacggcctccggcaccgccatccccatcgggggcgggagcgccaacgtgtacgtgaacctggcgccggtcgtgaacgtgggccagaacctggtcgtggacctctccacccagatcttctgccacaacgactaccccgagaccatcacggactacgtgaccctgcagcgggggagcgcctacggcggcgtcctgtccagcttctccgggaccgtgaagtacagcggctccagctaccccttccccaccacgtccgagaccccgcgcgtggtctacaacagccggaccgacaagccctggcccgtggccctctacctgacccccgtgtccagcgccgggggcgtcgcgatcaaggccgggtccctgatcgccgtgctcatcctgcgccagacgaacaactacaacagcgacgacttccagttcgtgtggaacatctacgccaacaacgacgtcgtggtgccgaccggcggctgcgacgtctccgcccgggacgtgaccgtgaccctgcccgactaccccgggagcgtccccatcccgctcacggtgtactgcgcgaagtcccagaacctgggctactacctgagcgggaccaccgccgacgccggcaacagcatcttcaccaacacggcctccttcagccccgcccagggcgtcggggtgcagctcacccgccagggcaccatcatccccgcggacaacaccgtgtccctgggggccgtcggcacgagcgccgtgtccctggggctcaccgccaactacgcccggaccggcggccaggtgaccgcggggaacgtccagagcatcatcggcgtgacgttcgtgtaccagcccggggacggcaacgccgacgtcaccatcaccgtgaacgggaaggtggtcgccaagtccggcggcgacatcatcaagctgctgaacgagcaggtcaacaaggagatgcagagctccaacctctacatgagcatgtccagctggtgctacacccactccctggacggggccggcctgttcctcttcgaccacgccgcggaggagtacgagcacgccaagaagctgatcatcttcctgaacgagaacaacgtgccggtgcagctcacgagcatctccgcccccgagcacaagttcgaggggctgacccagatcttccagaaggcctacgagcacgagcagcacatcagcgagtccatcaacaacatcgtggaccacgcgatcaagagcaaggaccacgccaccttcaacttcctgcagtggtacgtggccgagcagcacgaggaggaggtcctcttcaaggacatcctggacaagatcgagctgatcggcaacgagaaccacgggctctacctggccgaccagtacgtgaagggcatcgccaagtcccgcaagagctgaggactagtccctgttcccagagcccacttttttttctttttttgaaataaaatagcctgtctttcagatctaaaaaaaaaaaaaaaaaaaaaaaaaaaaaaaaaaaaaaaaaaaaaaaaaaaaaaaaaaaaaaaaaaaaaaaaaaaaaaaaaaaaaaaaaaaaaaaaaaaa

SEQ ID NO: 1019 - RNA, 1697 nt, synthetic construct
  misc_feature 1..1697: note Artificial____HsIgE(1-18)_Ec(J96)-FimH(22-300_N28S_V48C_L55 C_N91S_N249Q)_Linker-PGDGN_Ec(J96)-FimG(24-37)_Linker-SGG_F erritin(5-167_N19Q) mRNA opt1
  source 1..1697: mol_type = other RNA
aggagagtcccgcagtcggcgtccagcggctctgcttgttcgtgtgtgtgtcgttgcaggccttattcaagcttaccatggactggacctggatcctgttcctcgtggccgccgcgacccgcgtccacagcttcgcctgcaagacggcctccggcaccgccatccccatcgggggcgggagcgccaacgtgtacgtgaacctggcgccgtgcgtcaacgtgggccagaactgcgtggtcgacctgtccacccagatcttctgccacaacgactaccccgagaccatcacggactacgtgaccctccagcgggggagcgcctacggcggcgtgctgtccagcttctccgggaccgtcaagtacagcggctccagctaccccttccccaccacgtccgagaccccgcgcgtggtgtacaacagccggaccgacaagccctggcccgtcgccctgtacctcacccccgtgtccagcgccgggggcgtggcgatcaaggccgggtccctgatcgccgtcctgatcctccgccagacgaacaactacaacagcgacgacttccagttcgtgtggaacatctacgccaacaacgacgtggtcgtgccgaccggcggctgcgacgtgtccgcccgggacgtcaccgtgaccctgcccgactaccccgggagcgtgcccatcccgctgacggtctactgcgcgaagtcccagaacctcggctactacctgagcgggaccaccgccgacgccggcaacagcatcttcaccaacacggcctccttcagccccgcccagggcgtgggggtccagctgacccgccagggcaccatcatccccgcgaacaacaccgtgtccctcggggccgtgggcacgagcgccgtctccctggggctgaccgccaactacgcccggaccggcggccaggtgaccgcggggaacgtgcagagcatcatcggcgtcacgttcgtgtaccagcccggggacggcaacgccgacgtgaccatcaccgtcaacgggaaggtggtggccaagtccggcggcgacatcatcaagctcctgaacgagcaggtcaacaaggagatgcagagctccaacctgtacatgagcatgtccagctggtgctacacccactccctcgacggggccggcctgttcctgttcgaccacgccgcggaggagtacgagcacgccaagaagctcatcatcttcctgaacgagaacaacgtgccggtgcagctgacgagcatctccgcccccgagcacaagttcgaggggctcacccagatcttccagaaggcctacgagcacgagcagcacatcagcgagtccatcaacaacatcgtcgaccacgcgatcaagagcaaggaccacgccaccttcaacttcctgcagtggtacgtggccgagcagcacgaggaggaggtgctgttcaaggacatcctcgacaagatcgagctgatcggcaacgagaaccacgggctgtacctcgccgaccagtacgtcaagggcatcgccaagtcccgcaagagctgaggactagtccctgttcccagagcccacttttttttctttttttgaaataaaatagcctgtctttcagatctaaaaaaaaaaaaaaaaaaaaaaaaaaaaaaaaaaaaaaaaaaaaaaaaaaaaaaaaaaaaaaaaaaaaaaaaaaaaaaaaaaaaaaaaaaaaaaaaaaaa

SEQ ID NO: 1020 - RNA, 1697 nt, synthetic construct
  misc_feature 1..1697: note Artificial____HsIgE(1-18)_Ec(J96)-FimH(22-300_F165V)_Linker -PGDGN_Ec(J96)-FimG(24-37)_Linker-SGG_Ferritin(5-167_N19Q) mRNA opt1
  source 1..1697: mol_type = other RNA
aggagagtcccgcagtcggcgtccagcggctctgcttgttcgtgtgtgtgtcgttgcaggccttattcaagcttaccatggactggacctggatcctgttcctcgtggccgccgcgacccgcgtgcacagcttcgcctgcaagacggccaacggcaccgccatccccatcgggggcgggtccgccaacgtgtacgtgaacctggcgccggtcgtgaacgtgggccagaacctggtcgtggacctcagcacccagatcttctgccacaacgactaccccgagaccatcacggactacgtgaccctgcagcgggggtccgcctacggcggcgtcctgagcaacttctccgggaccgtgaagtacagcggctccagctaccccttccccaccacgtccgagaccccgcgcgtggtctacaacagccggaccgacaagccctggcccgtggccctctacctgacccccgtgtccagcgccgggggcgtcgcgatcaaggccgggtccctgatcgccgtgctcatcctgcgccagacgaacaactacaacagcgacgacttccaggtggtctggaacatctacgccaacaacgacgtggtggtcccgaccggcggctgcgacgtgtccgcccgggacgtgaccgtcaccctgcccgactaccccgggagcgtgcccatcccgctcacggtctactgcgcgaagtcccagaacctgggctactacctgagcgggaccaccgccgacgccggcaactccatcttcaccaacacggccagcttcagccccgcccagggcgtgggggtgcagctcacccgcaacggcaccatcatccccgcgaacaacaccgtctccctgggggccgtgggcacgagcgccgtgtccctggggctcaccgccaactacgcccggaccggcggccaggtcaccgcggggaacgtgcagagcatcatcggcgtgacgttcgtctaccagcccggggacggcaacgccgacgtgaccatcaccgtgaacgggaaggtcgtggccaagtccggcggcgacatcatcaagctgctgaacgagcaggtcaacaaggagatgcagagctccaacctctacatgagcatgtccagctggtgctacacccactccctggacggggccggcctgttcctcttcgaccacgccgcggaggagtacgagcacgccaagaagctgatcatcttcctgaacgagaacaacgtgccggtgcagctcacgagcatctccgcccccgagcacaagttcgaggggctgacccagatcttccagaaggcctacgagcacgagcagcacatcagcgagtccatcaacaacatcgtggaccacgcgatcaagagcaaggaccacgccaccttcaacttcctgcagtggtacgtcgccgagcagcacgaggaggaggtcctcttcaaggacatcctggacaagatcgagctgatcggcaacgagaaccacgggctctacctggccgaccagtacgtgaagggcatcgccaagtcccgcaagagctgaggactagtccctgttcccagagcccacttttttttctttttttgaaataaaatagcctgtctttcagatctaaaaaaaaaaaaaaaaaaaaaaaaaaaaaaaaaaaaaaaaaaaaaaaaaaaaaaaaaaaaaaaaaaaaaaaaaaaaaaaaaaaaaaaaaaaaaaaaaaaa

SEQ ID NO: 1021 - RNA, 974 nt, synthetic construct
  misc_feature 1..974: note Artificial____Ec(J96)-FimC(1-36)_Ec(J96)-FimC(37-241) mRNA opt3
  source 1..974: mol_type = other RNA
aggagagtcccgcagtcggcgtccagcggctctgcttgttcgtgtgtgtgtcgttgcaggccttattcaagcttaccatgagcaacaagaatgtgaacgtcagaaaatcccaggagatcaccttctgcctgctcgccggcattcttatgtttatggctatgatggttgcagggagggccgaagcgggagtggctctgggtgccacacgggtaatataccccgcaggccaaaaacaggtgcagttggccgtcactaataacgacgaaaattctacgtatttaatccagtcatgggtggagaacgctgatggggttaaggacggacgcttcattgtgacccctccactgtttgcaatgaagggcaaaaaggagaatacactacgaatcctcgatgccactaacaatcaactgccgcaggaccgtgaaagtcttttctggatgaacgtcaaggctattcccagcatggataaatccaagctgaccgagaatacattgcagctcgccatcatatctagaatcaaactgtactataggcctgcgaagctggcactcccacccgaccaggccgctgagaaattacggtttcgcagatcggccaactcactgacccttattaatcctactccatactatttgacagtgaccgaactgaacgcaggtacgagggtactagagaatgctctcgttccccctatgggggaaagcactgtgaagctgccaagtgatgccggatccaacatcacctaccggacaattaacgactatggcgcgcttactccgaagatgaccggcgtcatggagtgaggactagtccctgttcccagagcccacttttttttctttttttgaaataaaatagcctgtctttcagatctaaaaaaaaaaaaaaaaaaaaaaaaaaaaaaaaaaaaaaaaaaaaaaaaaaaaaaaaaaaaaaaaaaaaaaaaaaaaaaaaaaaaaaaaaaaaaaaaaaaa

SEQ ID NO: 1022 - RNA, 920 nt, synthetic construct
  misc_feature 1..920: note = Artificial____HsIgE(1-18)_Ec(J96)-FimC(37-241) mRNA opt3
  source 1..920: mol_type = other RNA
aggagagtcccgcagtcggcgtccagcggctctgcttgttcgtgtgtgtgtcgttgcaggccttattcaagcttaccatggactggacctggatcctgttcctcgtggccgctgcaacaagagtccacagcggcgttgcccttggggcgactagggtgatttaccccgctggacagaagcaagtacagctggccgtgacgaacaatgatgagaactccacctatttgatacagtcttgggtcgaaaatgcagacggtgtgaaagatggccggtttatcgttacacctccattattcgccatgaaggggaaaaaggagaacactctgcgcattctagacgctaccaataaccagctcccgcaagatcgagaatcactgttttggatgaatgtgaaagcaatccccagtatggacaagagcaaacttacagagaacaccctgcagttggccattatctcccgtataaagctctactatagacctgctaagctggccctgccacccgatcaggcggcagaaaaactcaggttccggcgctctgccaattcgttaactctgatcaaccctacaccatactatcttaccgtcacggagttgaatgctggaactagagtgctggagaacgccctagtaccccctatgggcgaatcaaccgttaagctcccaagcgacgcaggtagtaatattacatacaggactatcaacgattatggggctctgaccccgaaaatgacaggagtgatggagtgaggactagtccctgttcccagagcccacttttttttctttttttgaaataaaatagcctgtctttcagatctaaaaaaaaaaaaaaaaaaaaaaaaaaaaaaaaaaaaaaaaaaaaaaaaaaaaaaaaaaaaaaaaaaaaaaaaaaaaaaaaaaaaaaaaaaaaaaaaaaaa

SEQ ID NO: 1023 - RNA, 1151 nt, synthetic construct
  misc_feature 1..1151: note Artificial____Ec(J96)-FimH(1-21)_Ec(J96)-FimH(22-300) mRNA opt3
  source 1..1151: mol_type = other RNA
aggagagtcccgcagtcggcgtccagcggctctgcttgttcgtgtgtgtgtcgttgcaggccttattcaagcttaccatgaagagagtgatcaccctgttcgccgtcctccttatgggctggagcgttaacgcttggtcctttgcatgcaaaacagccaatgggactgcgattcccataggaggtggctctgctaacgtgtacgtaaatctggcccctgtggtcaacgtggggcagaatttggttgtggacttatcaacgcaaatcttctgtcacaacgattatccagagaccattacagactacgtcactctgcagaggggaagtgcatatggcggtgtgctaagcaatttttccgggaccgtaaagtactctggatcgtcatatccgttccccacaaccagcgaaactcctcgggttgtgtacaacagtcgcacagataaaccatggcccgtcgccctctatctgacccctgtgtcctctgctggcggcgtggcaatcaaggccgggagccttattgctgtcctgatcttgcgacagacgaataactacaattccgacgattttcagttcgtttggaacatatacgccaataacgacgtggtagtgccaactggaggttgcgatgtctcagcgcgtgacgtgaccgttacactccccgattatcctggcagtgtgccaatcccgctgactgtctactgtgcaaaaagccaaaatctggggtattacctctctggaaccacagccgacgctggcaactccatttttaccaacacggcctcattcagccccgcacagggtgtgggggtacagttaactagaaatggaacaatcattcctgctaacaataccgttagtctgggcgccgtgggcacttctgcggtctcccttgggttgacagccaactatgcaaggaccggaggtcaggtgacggctggcaatgtccaaagcatcataggggtgacctttgtttaccagtgaggactagtccctgttcccagagcccacttttttttctttttttgaaataaaatagcctgtctttcagatctaaaaaaaaaaaaaaaaaaaaaaaaaaaaaaaaaaaaaaaaaaaaaaaaaaaaaaaaaaaaaaaaaaaaaaaaaaaaaaaaaaaaaaaaaaaaaaaaaaaa

SEQ ID NO: 1024 - RNA, 1142 nt, synthetic construct
  misc_feature 1..1142: note = Artificial____HsIgE(1-18)_Ec(J96)-FimH(22-300) mRNA opt3
  source 1..1142: mol_type = other RNA
aggagagtcccgcagtcggcgtccagcggctctgcttgttcgtgtgtgtgtcgttgcaggccttattcaagcttaccatggactggacctggatcctgttcctcgtggccgctgcaacaagagtccacagctttgcctgcaagactgcgaacggcacggctattcccatagggggaggttccgccaatgtttacgtgaaccttgcacctgtagtgaatgtcggccagaacctggtggttgatttgtctacccaaatcttctgtcataatgactatccagagacaattactgattacgtgaccttacagagggggtcagcctatggaggcgtcctgagtaactttagcggtacagtgaaatactccgggtcttcgtatccgttccccaccacttcagaaacacctcgggtagtttacaatagccgcaccgacaagccatggcccgtggctctatatctcacgcctgtcagttccgcaggaggcgtggccatcaaagctggctctctgattgccgtgcttatcctgcgacagactaacaattacaacagcgatgactttcagttcgtctggaatatatacgcgaacaatgatgttgtggtaccaaccgggggatgcgacgtgtccgcacgtgatgtcacagtgactttgcccgactatcctggttcagttccaatcccgctcaccgtgtactgtgccaagagtcaaaacctgggctattacctgagcgggacaaccgctgatgccggaaattctatttttacgaacactgcatccttctcacccgctcagggcgtcggtgtgcagctcacaagaaacgggaccatcattcctgccaataacactgttagcttaggagcggtaggcacaagtgccgtgtctctgggccttaccgcaaattatgctaggaccgggggacaggtcacggccggtaacgtgcaatccatcataggcgtcacatttgtgtaccagtgaggactagtccctgttcccagagcccacttttttttctttttttgaaataaaatagcctgtctttcagatctaaaaaaaaaaaaaaaaaaaaaaaaaaaaaaaaaaaaaaaaaaaaaaaaaaaaaaaaaaaaaaaaaaaaaaaaaaaaaaaaaaaaaaaaaaaaaaaaaaaa

SEQ ID NO: 1025 - RNA, 1148 nt, synthetic construct
  misc_feature 1..1148: note = Artificial____MmIgK(1-20)_Ec(J96)-FimH(22-300) mRNA opt3
  source 1..1148: mol_type = other RNA
aggagagtcccgcagtcggcgtccagcggctctgcttgttcgtgtgtgtgtcgttgcaggccttattcaagcttaccatggagaccgacacactgctcctttgggtgctgttgttatgggtccccggcagcactgggttcgcctgcaagacggctaacggaaccgcaatccctattggtggcgggtccgccaatgtttacgtgaacctggcgccagtagtgaatgtcggacagaacctagtggttgatctctctacacaaatattttgtcacaatgactatccggaaactatcaccgattacgtgacactgcagagaggctcagcttatggtggggtccttagtaacttcagcggaaccgtgaaatactccggctcatcgtatccctttcctactacatcagagaccccaagggtagtttacaatagccggacggacaagccctggcctgtggccctgtatttgactccagtcagttccgcaggcggggtggccattaaagctggatctctcatcgcagtgctgattctgcgccagaccaacaattacaacagcgatgacttccagtttgtctggaatatctacgccaacaatgatgttgtggtacccacaggtggctgcgacgtgtccgctcgagatgtcactgtgaccctccctgactatccagggtcagttccgatacccttaacagtgtactgtgccaagagtcaaaacctgggatattaccttagcggcaccacggcggatgcaggtaattctatcttcactaacacagcctccttttctcctgctcagggggtcggagtgcagttgacccgtaacggcactattatcccagccaataacacagtaagcctgggcgcagttgggaccagtgctgtgtctctaggactcacggccaattatgcgagaaccggtggccaggtcacagccgggaacgtgcaatccattatcggagtcactttcgtgtaccagtgaggactagtccctgttcccagagcccacttttttttctttttttgaaataaaatagcctgtctttcagatctaaaaaaaaaaaaaaaaaaaaaaaaaaaaaaaaaaaaaaaaaaaaaaaaaaaaaaaaaaaaaaaaaaaaaaaaaaaaaaaaaaaaaaaaaaaaaaaaaaaa

SEQ ID NO: 1026 - RNA, 1208 nt, synthetic construct
  misc_feature 1..1208: note Artificial____Ec(J96)-FimH(1-21)_Ec(J96)-FimH(22-300)_Linke r-PGDGN_Ec(J96)-FimG(24-37) mRNA opt3
  source 1..1208: mol_type = other RNA
aggagagtcccgcagtcggcgtccagcggctctgcttgttcgtgtgtgtgtcgttgcaggccttattcaagcttaccatgaagagagtgatcaccctgttcgccgtcctccttatgggctggagcgttaacgcttggtcctttgcatgcaaaacagccaatgggactgcgattcccataggaggtggctctgctaacgtgtacgtaaatctggcccctgtggtcaacgtggggcagaatttggttgtggacttatcaacgcaaatcttctgtcacaacgattatccagagaccattacagactacgtcactctgcagaggggaagtgcatatggcggtgtgctaagcaatttttccgggaccgtaaagtactctggatcgtcatatccgttccccacaaccagcgaaactcctcgggttgtgtacaacagtcgcacagataaaccatggcccgtcgccctctatctgacccctgtgtcctctgctggcggcgtggcaatcaaggccgggagccttattgctgtcctgatcttgcgacagacgaataactacaattccgacgattttcagttcgtttggaacatatacgccaataacgacgtggtagtgccaactggaggttgcgatgtctcagcgcgtgacgtgaccgttacactccccgattatcctggcagtgtgccaatcccgctgactgtctactgtgcaaaaagccaaaatctggggtattacctctctggaaccacagccgacgctggcaactccatttttaccaacacggcctcattcagccccgcacagggtgtgggggtacagttaactagaaatggaacaatcattcctgctaacaataccgttagtctgggcgccgtgggcacttctgcggtctcccttgggttgacagccaactatgcaaggaccggaggtcaggtgacggctggcaatgtccaaagcatcataggggtgacctttgtttaccagccaggagatggcaacgccgacgtgacaattactgtaaatggtaaggtcgtggctaagtgaggactagtccctgttcccagagcccacttttttttctttttttgaaataaaatagcctgtctttcagatctaaaaaaaaaaaaaaaaaaaaaaaaaaaaaaaaaaaaaaaaaaaaaaaaaaaaaaaaaaaaaaaaaaaaaaaaaaaaaaaaaaaaaaaaaaaaaaaaaaaa

SEQ ID NO: 1027 - RNA, 1199 nt, synthetic construct
  misc_feature 1..1199: note Artificial____HsIgE(1-18)_Ec(J96)-FimH(22-300)_Linker-PGDGN _Ec(J96)-FimG(24-37) mRNA opt3
  source 1..1199: mol_type = other RNA
aggagagtcccgcagtcggcgtccagcggctctgcttgttcgtgtgtgtgtcgttgcaggccttattcaagcttaccatggactggacctggatcctgttcctcgtggccgctgcaacaagagtccacagctttgcctgcaagactgcgaacggcacggctattcccatagggggaggttccgccaatgtttacgtgaaccttgcacctgtagtgaatgtcggccagaacctggtggttgatttgtctacccaaatcttctgtcataatgactatccagagacaattactgattacgtgaccttacagagggggtcagcctatggaggcgtcctgagtaactttagcggtacagtgaaatactccgggtcttcgtatccgttccccaccacttcagaaacacctcgggtagtttacaatagccgcaccgacaagccatggcccgtggctctatatctcacgcctgtcagttccgcaggaggcgtggccatcaaagctggctctctgattgccgtgcttatcctgcgacagactaacaattacaacagcgatgactttcagttcgtctggaatatatacgcgaacaatgatgttgtggtaccaaccgggggatgcgacgtgtccgcacgtgatgtcacagtgactttgcccgactatcctggttcagttccaatcccgctcaccgtgtactgtgccaagagtcaaaacctgggctattacctgagcgggacaaccgctgatgccggaaattctatttttacgaacactgcatccttctcacccgctcagggcgtcggtgtgcagctcacaagaaacgggaccatcattcctgccaataacactgttagcttaggagcggtaggcacaagtgccgtgtctctgggccttaccgcaaattatgctaggaccgggggacaggtcacggccggtaacgtgcaatccatcataggcgtcacatttgtgtaccagccaggggacggaaatgctgatgttactattaccgtgaacggcaaagtagtcgccaagtgaggactagtccctgttcccagagcccacttttttttctttttttgaaataaaatagcctgtctttcagatctaaaaaaaaaaaaaaaaaaaaaaaaaaaaaaaaaaaaaaaaaaaaaaaaaaaaaaaaaaaaaaaaaaaaaaaaaaaaaaaaaaaaaaaaaaaaaaaaaaaa

SEQ ID NO: 1028 - RNA, 1205 nt, synthetic construct
  misc_feature 1..1205: note Artificial____HsIgE(1-18)_Ec(J96)-FimH(22-300)_Linker-G4SGG _Ec(J96)-FimG(24-37) mRNA opt3
  source 1..1205: mol_type = other RNA
aggagagtcccgcagtcggcgtccagcggctctgcttgttcgtgtgtgtgtcgttgcaggccttattcaagcttaccatggactggacctggatcctgttcctcgtggccgctgcaacaagagtccacagctttgcctgcaagactgcgaacggcacggctattcccatagggggaggttccgccaatgtttacgtgaaccttgcacctgtagtgaatgtcggccagaacctggtggttgatttgtctacccagatcttctgtcataatgactatccagagacaattactgattacgtgaccttacagagggggtcagcctatggaggcgtcctgagtaactttagcggtacagtgaaatactccgggtcttcgtatccgttccccaccacttcagaaacacctcgggtagtttacaatagccgcaccgacaagccatggcccgtggctctatatctcacgcctgtcagttccgcaggaggcgtggccatcaaagctggctctctgattgccgtgcttatcctgcgacagactaacaattacaacagcgatgactttcagttcgtctggaatatatacgcgaacaatgatgttgtggtaccaaccgggggatgcgacgtgtccgcacgtgatgtcacagtgactttgcccgactatcctggttcagttccaatcccgctcaccgtgtactgtgccaagagtcaaaacctgggctattacctgagcgggacaaccgctgatgccggaaattctatttttacgaacactgcatccttctcacccgctcagggcgtcggtgtgcagctcacaagaaacgggaccatcattcctgccaataacactgttagcttaggagcggtaggcacaagtgccgtgtctctgggccttaccgcaaattatgctaggaccgggggacaggtcacggccggtaacgtgcaatccatcataggcgtcacatttgtgtaccaagggggaggcggtagcgggggcgctgacgttactattaccgtgaatggaaaagtagtcgccaagtgaggactagtccctgttcccagagcccacttttttttctttttttgaaataaaatagcctgtctttcagatctaaaaaaaaaaaaaaaaaaaaaaaaaaaaaaaaaaaaaaaaaaaaaaaaaaaaaaaaaaaaaaaaaaaaaaaaaaaaaaaaaaaaaaaaaaaaaaaaaaaa

SEQ ID NO: 1029 - RNA, 1205 nt, synthetic construct
  misc_feature 1..1205: note Artificial____MmIgK(1-20)_Ec(J96)-FimH(22-300)_Linker-PGDGN _Ec(J96)-FimG(24-37) mRNA opt3
  source 1..1205: mol_type = other RNA
aggagagtcccgcagtcggcgtccagcggctctgcttgttcgtgtgtgtgtcgttgcaggccttattcaagcttaccatggagaccgacacactgctcctttgggtgctgttgttatgggtccccggcagcactgggttcgcctgcaagacggctaacggaaccgcaatccctattggtggcgggtccgccaatgtttacgtgaacctggcgccagtagtgaatgtcggacagaacctagtggttgatctctctacacaaatattttgtcacaatgactatccggaaactatcaccgattacgtgacactgcagagaggctcagcttatggtggggtccttagtaacttcagcggaaccgtgaaatactccggctcatcgtatccctttcctactacatcagagaccccaagggtagtttacaatagccggacggacaagccctggcctgtggccctgtatttgactccagtcagttccgcaggcggggtggccattaaagctggatctctcatcgcagtgctgattctgcgccagaccaacaattacaacagcgatgacttccagtttgtctggaatatctacgccaacaatgatgttgtggtacccacaggtggctgcgacgtgtccgctcgagatgtcactgtgaccctccctgactatccagggtcagttccgatacccttaacagtgtactgtgccaagagtcaaaacctgggatattaccttagcggcaccacggcggatgcaggtaattctatcttcactaacacagcctccttttctcctgctcagggggtcggagtgcagttgacccgtaacggcactattatcccagccaataacacagtaagcctgggcgcagttgggaccagtgctgtgtctctaggactcacggccaattatgcgagaaccggtggccaggtcacagccgggaacgtgcaatccattatcggagtcactttcgtgtaccagcccggcgacggtaatgcagatgttaccataacagtgaacgggaaagtagtcgctaagtgaggactagtccctgttcccagagcccacttttttttctttttttgaaataaaatagcctgtctttcagatctaaaaaaaaaaaaaaaaaaaaaaaaaaaaaaaaaaaaaaaaaaaaaaaaaaaaaaaaaaaaaaaaaaaaaaaaaaaaaaaaaaaaaaaaaaaaaaaaaaaa

SEQ ID NO: 1030 - RNA, 1205 nt, synthetic construct
  misc_feature 1..1205: note Artificial____MmIgK(1-20)_Ec(536)-FimH(22-300)_Linker-PGDGN _Ec(J96)-FimG(24-37) mRNA opt3
  source 1..1205: mol_type = other RNA
aggagagtcccgcagtcggcgtccagcggctctgcttgttcgtgtgtgtgtcgttgcaggccttattcaagcttaccatggagaccgacacactgctcctttgggtgctgttgttatgggtccccggcagcactgggttcgcctgcaagacggctaacggaaccgcaatccctattggtggcgggtccgccaatgtttacgtgaacctggcgccagctgtaaatgtgggacagaacctagtcgtggatctctctacacaaatattttgtcacaatgactatccggaaactatcaccgattacgttacactgcagagaggctcagcctatggtggggtgcttagtagcttctccggaaccgtcaaatacaacggctcatcgtatccctttcctactacatcagagaccccaagggtggtatacaatagccggacggacaagccctggcctgttgcactgtatttgactccagtgagttccgccggcggggtcgctattaaagcaggatctctcatcgccgtgctgattctgcgccagaccaacaattacaacagcgatgacttccagtttgtgtggaatatctacgctaacaatgatgtcgttgtgcccacaggtggctgcgacgtatccgcccgagatgtgactgtcaccctccctgactatccagggtcagtgccgatacccttaacagtttactgtgcgaagagtcaaaacctgggatattaccttagcggcaccacggcagatgccggtaattctatcttcactaacacagcttccttttctcctgcccagggggtgggagtccagttgacccgtaacggcactattatcccagcaaataacacagtgagcctgggcgctgtagggaccagtgccgtttctctaggactcacggcgaattatgccagaaccggtggccaggtgacagcagggaacgtccaatccattatcggagtgactttcgtctaccagcccggcgacggtaatgctgatgtgaccataacagttaacgggaaagtggtagccaagtgaggactagtccctgttcccagagcccacttttttttctttttttgaaataaaatagcctgtctttcagatctaaaaaaaaaaaaaaaaaaaaaaaaaaaaaaaaaaaaaaaaaaaaaaaaaaaaaaaaaaaaaaaaaaaaaaaaaaaaaaaaaaaaaaaaaaaaaaaaaaaa

SEQ ID NO: 1031 - RNA, 1229 nt, synthetic construct
  misc_feature 1..1229: note Artificial____HsIgE(1-18)_Ec(J96)-FimH(22-300)_Linker-(G4S) 3_Ec(J96)-FimC(135-148) mRNA opt3
  source 1..1229: mol_type = other RNA
aggagagtcccgcagtcggcgtccagcggctctgcttgttcgtgtgtgtgtcgttgcaggccttattcaagcttaccatggactggacctggatcctgttcctcgtggccgctgcaacaagagtccacagctttgcctgcaagactgcgaacggcacggctattcccatagggggaggttccgccaatgtttacgtgaaccttgcacctgtagtgaatgtcggccagaacctggtggttgatttgtctacccagatcttctgtcataatgactatccagagacaattactgattacgtgaccttacagagggggtcagcctatggaggcgtcctgagtaactttagcggtacagtgaaatactccgggtcttcgtatccgttccccaccacttcagaaacacctcgggtagtttacaatagccgcaccgacaagccatggcccgtggctctatatctcacgcctgtcagttccgcaggaggcgtggccatcaaagctggctctctgattgccgtgcttatcctgcgacagactaacaattacaacagcgatgactttcagttcgtctggaatatatacgcgaacaatgatgttgtggtaccaaccgggggatgcgacgtgtccgcacgtgatgtcacagtgactttgcccgactatcctggttcagttccaatcccgctcaccgtgtactgtgccaagagtcaaaacctgggctattacctgagcgggacaaccgctgatgccggaaattctatttttacgaacactgcatccttctcacccgctcagggcgtcggtgtgcagctcacaagaaacgggaccatcattcctgccaataacactgtatcgttaggagcggttggcacaagtgccgtgtctctgggccttaccgcaaattatgctaggaccgggggacaggtcacggccggtaacgtgcaatccatcataggcgtcacatttgtgtaccaagggggaggcggtagcgggggcggaggcagcgggggaggtggctctactgagaataccttgcagctggctattatctcccggattaaatgaggactagtccctgttcccagagcccacttttttttctttttttgaaataaaatagcctgtctttcagatctaaaaaaaaaaaaaaaaaaaaaaaaaaaaaaaaaaaaaaaaaaaaaaaaaaaaaaaaaaaaaaaaaaaaaaaaaaaaaaaaaaaaaaaaaaaaaaaaaaaa

SEQ ID NO: 1032 - RNA, 1652 nt, synthetic construct
  misc_feature 1..1652: note Artificial____LumSynth(1-154_C37A_N102D)_Linker(GGS)4-GGG_E c(J96)-FimH(22-300)_Linker-PGDGN_Ec(J96)-FimG(24-37) mRNA opt3
  source 1..1652: mol_type = other RNA
aggagagtcccgcagtcggcgtccagcggctctgcttgttcgtgtgtgtgtcgttgcaggccttattcaagcttaccatgcagatctacgagggcaagctgaccgccgaagggctcagattcggaattgtggctagcaggtttaaccacgcacttgtcgaccggctggttgagggtgccatagatgcgatcgtgcgccatggcgggcgagaagaggacattacattggtacgtgtgcccggatcctgggaaatccctgtcgctgccggcgagttagcaagaaaagaggatattgacgccgtgatcgctataggtgttctgatcaggggagcaactccacacttcgattatattgcctctgaagtgtcaaaggggctagctgacctcagtctggagcttcggaaaccgatcacgtttggcgtcattaccgccgatacactggaacaagcgatcgagcgcgcaggcactaagcatgggaataaaggatgggaggccgctttgagcgccatagaaatggcaaacctcttcaagtccctgagaggtggctctgggggatcgggcggttcagggggaagcggcggcgggtttgcttgcaagaccgccaatggaacagcgattcccatcggtggcgggagtgccaacgtgtacgtaaatctggcacctgttgtgaacgtcggacagaatctcgtggtggacttatccacccagattttctgtcacaacgattatccagagactatcacagactacgtcaccctgcagaggggctctgcttatggtggggttcttagcaatttttccggcacggtgaaatactcaggaagtagctatcccttccctactacctctgaaacaccacgggtagtgtacaactcccgcactgataagccctggcctgtcgccttgtacctgaccccagtgtcaagcgctggcggggttgccatcaaagcaggaagtctaattgccgtgctcatactgcgacaaacaaataactataattctgacgattttcagttcgtctggaacatctacgctaataacgacgtggtagttccgaccggtggctgcgacgtgtccgcgagagatgtcacggtgactcttcccgactatcctgggagcgtcccaattcccctgacagtgtactgtgcaaagtcgcagaacttgggatattacctctctggcaccactgccgatgctggtaattccatctttacaaacaccgcctcattcagtcctgcacagggggttggcgtgcaactgacgaggaatggaaccataattccagccaacaatacagtcagcttaggcgctgtagggacttccgccgtgtctctgggactcaccgcaaactatgcgcggacaggtggccaggttactgctgggaatgtgcagagcatcatcggagtcacctttgtgtaccagcccggcgacggtaacgccgatgtaacaattaccgtgaatgggaaagttgtcgcaaagtgaggactagtccctgttcccagagcccacttttttttctttttttgaaataaaatagcctgtctttcagatctaaaaaaaaaaaaaaaaaaaaaaaaaaaaaaaaaaaaaaaaaaaaaaaaaaaaaaaaaaaaaaaaaaaaaaaaaaaaaaaaaaaaaaaaaaaaaaaaaaaa

SEQ ID NO: 1033 - RNA, 1670 nt, synthetic construct
  misc_feature 1..1670: note Artificial____HsIgE(1-18)_Ec(J96)-FimH(22-300)_Linker-PGDGN _Ec(J96)-FimG(24-37)_Linker-SGG_LumSynth(1-154_C37A_N102D) mRNA opt3
  source 1..1670: mol_type = other RNA
aggagagtcccgcagtcggcgtccagcggctctgcttgttcgtgtgtgtgtcgttgcaggccttattcaagcttaccatggactggacctggatcctgttcctcgtggccgctgcaacaagagtccacagctttgcctgcaagactgcgaacggcacggctattcccatagggggaggttccgccaatgtttacgtgaaccttgcacctgtagtgaatgtcggccagaacctggtggttgatttgtctacccaaatcttctgtcataatgactatccagagacaattactgattacgtgaccttacagagggggtcagcctatggaggcgtcctgagtaactttagcggtacagtgaaatactccgggtcttcgtatccgttccccaccacttcagaaacacctcgggtagtttacaatagccgcaccgacaagccatggcccgtggctctatatctcacgcctgtcagttccgcaggaggcgtggccatcaaagctggctctctgattgccgtgcttatcctgcgacagactaacaattacaacagcgatgactttcagttcgtctggaatatatacgcgaacaatgatgttgtggtaccaaccgggggatgcgacgtgtccgcacgtgatgtcacagtgactttgcccgactatcctggttcagttccaatcccgctcaccgtgtactgtgccaagagtcaaaacctgggctattacctgagcgggacaaccgctgatgccggaaattctatttttacgaacactgcatccttctcacccgctcagggcgtcggtgtgcagctcacaagaaacgggaccatcattcctgccaataacactgttagcttaggagcggtaggcacaagtgccgtgtctctgggccttaccgcaaattatgctaggaccgggggacaggtcacggccggtaacgtgcaatccatcataggcgtcacatttgtgtaccagccaggggacggaaatgctgatgttactattaccgtgaacggcaaagtagtcgccaagagcggtgggatgcagatctatgagggcaagttgacagcagaaggactgcggttcggcattgtggcctcgcgctttaatcacgctctagttgacagactcgtggagggggcgatcgacgcaatcgtcaggcatggaggtcgggaagaggatattactctggtgcgcgtacccggctcttgggagatacctgtggccgctggggaacttgcccgaaaagaggacatcgatgcagttattgccatcggagtcctgataagaggcgctaccccacacttcgactacattgcctccgaagtgtcaaagggtttggcagatctcagtctggagttaaggaaacccatcacatttggggtgatcaccgcggacactctggagcaggctattgaacgggccggcacgaagcatggaaacaaaggctgggaggcagccctcagcgctatcgaaatggccaatcttttcaagtccctgcgttgaggactagtccctgttcccagagcccacttttttttctttttttgaaataaaatagcctgtctttcagatctaaaaaaaaaaaaaaaaaaaaaaaaaaaaaaaaaaaaaaaaaaaaaaaaaaaaaaaaaaaaaaaaaaaaaaaaaaaaaaaaaaaaaaaaaaaaaaaaaaaa

SEQ ID NO: 1034 - RNA, 1697 nt, synthetic construct
  misc_feature 1..1697: note Artificial____HsIgE(1-18)_Ec(J96)-FimH(22-300)_Linker-PGDGN _Ec(J96)-FimG(24-37)_Linker-SGG_Ferritin(5-167_N19Q) mRNA opt3
  source 1..1697: mol_type = other RNA
aggagagtcccgcagtcggcgtccagcggctctgcttgttcgtgtgtgtgtcgttgcaggccttattcaagcttaccatggactggacctggatcctgttcctcgtggccgctgcaacaagagtccacagctttgcctgcaagactgcgaacggcacggctattcccatagggggaggttccgccaatgtttacgtgaaccttgcacctgtagtgaatgtcggccagaacctggtggttgatttgtctacccaaatcttctgtcataatgactatccagagacaattactgattacgtgaccttacagagggggtcagcctatggaggcgtcctgagtaactttagcggtacagtgaaatactccgggtcttcgtatccgttccccaccacttcagaaacacctcgggtagtttacaatagccgcaccgacaagccatggcccgtggctctatatctcacgcctgtcagttccgcaggaggcgtggccatcaaagctggctctctgattgccgtgcttatcctgcgacagactaacaattacaacagcgatgactttcagttcgtctggaatatatacgcgaacaatgatgttgtggtaccaaccgggggatgcgacgtgtccgcacgtgatgtcacagtgactttgcccgactatcctggttcagttccaatcccgctcaccgtgtactgtgccaagagtcaaaacctgggctattacctgagcgggacaaccgctgatgccggaaattctatttttacgaacactgcatccttctcacccgctcagggcgtcggtgtgcagctcacaagaaacgggaccatcattcctgccaataacactgtgagcttaggagcggttggcacaagtgccgtgtctctgggccttaccgcaaattatgctaggaccgggggacaggtcacggccggtaacgtgcaatccatcataggcgtcacatttgtgtaccagccaggggacggaaatgctgatgttactattaccgtgaacggcaaagtagtcgccaagagcggtggggacatcattaagttgctgaatgagcaggtaaacaaagaaatgcagtcgtctaatctatatatgtccatgtcaagttggtgctacacacacagcctcgacggcgcaggactgttcctttttgatcatgccgctgaggaatacgagcacgcgaagaaactgatcatcttcttgaacgagaataacgttcccgtgcaactcacttccatttctgcacctgaacataagtttgagggcctgacccagatattccagaaagcctatgaacacgagcaacacatcagcgagtcaattaataacatcgtcgaccatgctataaagagtaaggatcacgccacattcaactttttacagtggtacgtggcagaacagcatgaggaagaggtactgttcaaagacattctcgataagatcgaacttatcgggaatgagaaccacggactgtatttggccgaccagtacgtgaaaggtattgctaagtcccggaaaagctgaggactagtccctgttcccagagcccacttttttttctttttttgaaataaaatagcctgtctttcagatctaaaaaaaaaaaaaaaaaaaaaaaaaaaaaaaaaaaaaaaaaaaaaaaaaaaaaaaaaaaaaaaaaaaaaaaaaaaaaaaaaaaaaaaaaaaaaaaaaaaa

SEQ ID NO: 1035 - RNA, 1727 nt, synthetic construct
  misc_feature 1..1727: note Artificial____MmIgK(1-20)_Ec(J96)-FimH(22-300)_Linker-PGDGN _Ec(J96)-FimG(24-37)_Linker-(GGS)4_Ferritin(5-166) mRNA opt3
  source 1..1727: mol_type = other RNA
aggagagtcccgcagtcggcgtccagcggctctgcttgttcgtgtgtgtgtcgttgcaggccttattcaagcttaccatggagaccgacacactgctcctttgggtgctgttgttatgggtccccggcagcactgggttcgcctgcaagacggctaacggaaccgcaatccctattggtggcgggtccgccaatgtttacgtgaacctggcgccagtagtgaatgtcggacagaacctagtggttgatctctctacacaaatattttgtcacaatgactatccggaaactatcaccgattacgtgacactgcagagaggctcagcttatggtggggtccttagtaacttcagcggaaccgtgaaatactccggctcatcgtatccctttcctactacatcagagaccccaagggtagtttacaatagccggacggacaagccctggcctgtggccctgtatttgactccagtcagttccgcaggcggggtggccattaaagctggatctctcatcgcagtgctgattctgcgccagaccaacaattacaacagcgatgacttccagtttgtctggaatatctacgccaacaatgatgttgtggtacccacaggtggctgcgacgtgtccgctcgagatgtcactgtgaccctccctgactatccagggtcagttccgatacccttaacagtgtactgtgccaagagtcaaaacctgggatattaccttagcggcaccacggcggatgcaggtaattctatcttcactaacacagcctccttttctcctgctcagggggtcggagtgcagttgacccgtaacggcactattatcccagccaataacacagtaagcctgggcgcagttgggaccagtgctgtgtctctaggactcacggccaattatgcgagaaccggtggccaggtcacagccgggaacgtgcaatccattatcggagtcactttcgtgtaccagcccggcgacggtaatgcagatgttaccataacagtgaacgggaaagtagtcgctaagggcggaagcggcgggtcgggaggttctggcgggtccgacattatcaagctgcttaatgaacaggtgaacaaagagatgaactcaagtaatctgtatatgagcatgtcctcttggtgctacactcatagcttggacggagccggcctctttctgttcgatcacgctgccgaagagtacgagcatgcaaagaaattaattatctttctgaatgaaaacaatgttcctgtgcagctcacctcaatcagtgccccagagcacaagttcgaaggtcttacacaaatttttcagaaggcttatgagcatgagcagcacatatccgaaagcatcaacaatattgtcgaccacgcgatcaaatctaaggatcatgcaaccttcaacttcctgcaatggtacgtggccgagcagcacgaagaggaagtattgtttaaagacatactagataagattgagctgatcgggaacgagaatcatggcctctatctggctgaccagtacgtgaaaggaatcgccaagtcaaggaaatgaggactagtccctgttcccagagcccacttttttttctttttttgaaataaaatagcctgtctttcagatctaaaaaaaaaaaaaaaaaaaaaaaaaaaaaaaaaaaaaaaaaaaaaaaaaaaaaaaaaaaaaaaaaaaaaaaaaaaaaaaaaaaaaaaaaaaaaaaaaaaa

SEQ ID NO: 1036 - RNA, 1370 nt, synthetic construct
  misc_feature 1..1370: note Artificial____HsIgE(1-18)_Ec(J96)-FimH(22-300)_Linker-PGDGN _Ec(J96)-FimG(24-37)_TMdomain-HA(510-566) mRNA opt3
  source 1..1370: mol_type = other RNA
aggagagtcccgcagtcggcgtccagcggctctgcttgttcgtgtgtgtgtcgttgcaggccttattcaagcttaccatggactggacctggatcctgttcctcgtggccgctgcaacaagagtccacagctttgcctgcaagactgcgaacggcacggctattcccatagggggaggttccgccaatgtttacgtgaaccttgcacctgtagtgaatgtcggccagaacctggtggttgatttgtctacccaaatcttctgtcataatgactatccagagacaattactgattacgtgaccttacagagggggtcagcctatggaggcgtcctgagtaactttagcggtacagtgaaatactccgggtcttcgtatccgttccccaccacttcagaaacacctcgggtagtttacaatagccgcaccgacaagccatggcccgtggctctatatctcacgcctgtcagttccgcaggaggcgtggccatcaaagctggctctctgattgccgtgcttatcctgcgacagactaacaattacaacagcgatgactttcagttcgtctggaatatatacgcgaacaatgatgttgtggtaccaaccgggggatgcgacgtgtccgcacgtgatgtcacagtgactttgcccgactatcctggttcagttccaatcccgctcaccgtgtactgtgccaagagtcaaaacctgggctattacctgagcgggacaaccgctgatgccggaaattctatttttacgaacactgcatccttctcacccgctcagggcgtcggtgtgcagctcacaagaaacgggaccatcattcctgccaataacactgttagcttaggagcggtaggcacaagtgccgtgtctctgggccttaccgcaaattatgctaggaccgggggacaggtcacggccggtaacgtgcaatccatcataggcgtcacatttgtgtaccagccaggggacggaaatgctgatgttactattaccgtgaacggcaaagtagtcgccaaggcaaagttgaatcgggaggaaatcgacggtgtgaaactggagagcacacgcatttatcagatcctagccatctactcgactgttgcttcttccctcgtgctggtcgtgtcacttggggcgattagtttctggatgtgcagcaacggctccctgcagtgtagaatatgcatctgaggactagtccctgttcccagagcccacttttttttctttttttgaaataaaatagcctgtctttcagatctaaaaaaaaaaaaaaaaaaaaaaaaaaaaaaaaaaaaaaaaaaaaaaaaaaaaaaaaaaaaaaaaaaaaaaaaaaaaaaaaaaaaaaaaaaaaaaaaaaaa

SEQ ID NO: 1037 - RNA, 1703 nt, synthetic construct
  misc_feature 1..1703: note Artificial____HsIgE(1-18)_LumSynth(1-154_C37A_N102D)_Linker (GGS)4-GGG_Ec(J96)-FimH(22-300)_Linker-PGDGN_Ec(J96)-FimG(2 4-37) mRNA opt3
  source 1..1703: mol_type = other RNA
aggagagtcccgcagtcggcgtccagcggctctgcttgttcgtgtgtgtgtcgttgcaggccttattcaagcttaccatggactggacctggatcctgttcctcgtggccgctgcaacaagagtccacagccagatttacgagggcaaacttactgccgaagggctgaggtttggaatagttgcgtcccggttcaaccatgctttggtggatcgcttagtagagggtgccatcgacgcaattgtgcgacacggcgggcgtgaagaggatatcacgctggtcagagtgcccggatcttgggaaattcctgttgccgctggcgagctagcaaggaaggaggacatcgatgccgtgatagctatcggtgtcctcattcgcggggccaccccacattttgactatatcgcgtcagaagtgagtaagggactggcagatcttagcctggagttgcggaaaccgattacattcggcgtaatcactgccgacaccctcgaacaagctatagagagagccggcacaaagcacgggaataaaggatgggaggcagctctgtccgccattgaaatggcgaacctgtttaagtctctcaggggtggctcagggggatcgggcggtagcgggggaagtggcggcgggttcgcctgcaagaccgcaaatggaactgctatccccattggtggcgggtccgccaacgtttacgtgaatttagctcctgtcgtgaacgtgggacagaatctggtcgttgatctttctacacagatcttttgtcataacgactatccagagaccatcacggattacgtgactttgcagcggggcagcgcctatggtggggtactgtccaatttctcaggcaccgtgaaatacagtggaagctcttatccctttcctacaacttccgaaaccccacgcgtcgtgtacaactcacgaacagacaagccctggcctgttgcactatacctcaccccagtgagcagtgccggcggggtcgctattaaagcgggatctctgatagcagtgcttatcctgagacaaacgaataactataattccgatgacttccagtttgtatggaacatttacgccaataacgacgttgtggtcccgactggtggctgcgatgtgagcgctagggacgtcacagtgaccttgcccgattatcctgggtcggttccaatccccctcactgtgtactgtgccaagtctcagaacctgggatattacttatccggcacaaccgcagacgccggtaattcaatattcacgaacaccgctagttttagccctgcccagggggtaggcgtccaactgacacggaatggaactattatcccagcaaacaataccgtgtccctcggcgcggttgggacatctgctgtgagccttggactgactgccaactatgcacgtaccggtggccaggtcacagccgggaatgtgcagtcaatcattggagtaaccttcgtgtaccagcccggcgatggtaacgctgacgttactatcacggtcaatgggaaagtggtggccaagtgaggactagtccctgttcccagagcccacttttttttctttttttgaaataaaatagcctgtctttcagatctaaaaaaaaaaaaaaaaaaaaaaaaaaaaaaaaaaaaaaaaaaaaaaaaaaaaaaaaaaaaaaaaaaaaaaaaaaaaaaaaaaaaaaaaaaaaaaaaaaaa

SEQ ID NO: 1038 - RNA, 1670 nt, synthetic construct
  misc_feature 1..1670: note Artificial____HsIgE(1-18)_Ec(J96)-FimH(22-300_N28S_N91S_N24 9Q)_Linker-PGDGN_Ec(J96)-FimG(24-37)_Linker-SGG_LumSynth(1- 154_C37A_N102D) mRNA opt3
  source 1..1670: mol_type = other RNA
aggagagtcccgcagtcggcgtccagcggctctgcttgttcgtgtgtgtgtcgttgcaggccttattcaagcttaccatggactggacctggatcctgttcctcgtggccgctgcaacaagagtccacagctttgcctgcaagactgcgtccggcacggctattcccatagggggaggttctgccaacgtttacgtgaatcttgcacctgtagtgaacgtcggccagaatctggtggttgatttgtcaacccaaatcttctgtcataacgactatccagagacaattactgattacgtgaccttacagagggggagtgcctatggaggcgtcctgagctccttttctggtacagtgaaatactcggggtcaagctatccgttccccaccacgagtgaaacacctcgggtagtttacaattcccgcaccgacaagccatggcccgtggctctatatctcacgcctgtctctagcgcaggaggcgtggccatcaaagctggctccctgattgccgtgcttatcctgcgacagactaacaattacaactcagatgactttcagttcgtctggaatatatacgcgaacaatgatgttgtggtaccaaccgggggatgcgacgtgagtgcacgtgatgtcacagtgactttgcccgactatcctggtagcgttccaatcccgctcaccgtgtactgtgccaagtctcaaaacctgggctattacctgtccgggacaaccgctgatgccggaaattcaatttttacgaacactgctagcttcagtcccgcacagggcgtcggtgtgcagctcacaagacaggggaccatcattcctgccaataacactgtatctttaggagcggttggcacatccgccgtgagcctgggccttaccgcaaactatgctaggactgggggacaagtcaccgccggtaatgtgcagtcgatcataggcgtcacatttgtgtaccagccaggggacggaaacgctgatgttactattaccgtgaatggcaaagtagtcgccaagtctggtgggatgcagatctatgagggcaagttgacagcagaaggactgcggttcggcattgtggcctcccgctttaaccacgctctagttgacagactcgtggagggggcgatcgacgcaatcgtcaggcatggaggtcgggaagaggatattactctggtgcgcgtacccggctcatgggagatacctgtggccgctggggaacttgcccgaaaagaggacatcgatgcagttattgccatcggagtcctgataagaggcgctaccccacacttcgactacattgccagtgaagtgagcaagggtttggcagatctctccctggagttaaggaaacccatcacatttggggtgatcaccgcggacactctggagcaagctattgaacgggccggcacgaagcatggaaataaaggctgggaggcagccctctctgctatcgaaatggccaaccttttcaagagcctgcgttgaggactagtccctgttcccagagcccacttttttttctttttttgaaataaaatagcctgtctttcagatctaaaaaaaaaaaaaaaaaaaaaaaaaaaaaaaaaaaaaaaaaaaaaaaaaaaaaaaaaaaaaaaaaaaaaaaaaaaaaaaaaaaaaaaaaaaaaaaaaaaa

SEQ ID NO: 1039 - RNA, 1670 nt, synthetic construct
  misc_feature 1..1670: note Artificial____HsIgE(1-18)_Ec(J96)-FimH(22-300_N28S_N91S_N24 9Q_N256D)_Linker-PGDGN_Ec(J96)-FimG(24-37)_Linker-SGG_LumSy nth(1-154_C37A_N102D) mRNA opt3
  source 1..1670: mol_type = other RNA
aggagagtcccgcagtcggcgtccagcggctctgcttgttcgtgtgtgtgtcgttgcaggccttattcaagcttaccatggactggacctggatcctgttcctcgtggccgctgcaacaagagtccacagctttgcctgcaagactgcgtccggcacggctattcccatagggggaggttctgccaacgtttacgtgaatcttgcacctgtagtgaacgtcggccagaatctggtggttgatttgtcaacccaaatcttctgtcataacgactatccagagacaattactgattacgtgaccttacagagggggagtgcctatggaggcgtcctgagctccttttctggtacagtgaaatactcggggtcaagctatccgttccccaccacgagtgaaacacctcgggtagtttacaattcccgcaccgacaagccatggcccgtggctctatatctcacgcctgtctctagcgcaggaggcgtggccatcaaagctggctccctgattgccgtgcttatcctgcgacagactaacaattacaactcagatgactttcagttcgtctggaatatatacgcgaacaatgatgttgtggtaccaaccgggggatgcgacgtgagtgcacgtgatgtcacagtgactttgcccgactatcctggtagcgttccaatcccgctcaccgtgtactgtgccaagtctcaaaacctgggctattacctgtccgggacaaccgctgatgccggaaattcaatttttacgaacactgctagcttcagtcccgcacagggcgtcggtgtgcagctcacaagacaggggaccatcattcctgccgacaatactgtatctttaggagcggttggcacatccgccgtgagcctgggccttaccgcaaactatgctaggactgggggacaagtcaccgccggtaacgtgcagtcgatcataggcgtcacatttgtgtaccagccaggggatggaaatgctgacgttactattaccgtgaacggcaaagtagtcgccaagtctggtgggatgcagatctatgagggcaagttgacagcagaaggactgcggttcggcattgtggcctcccgctttaatcacgctctagttgacagactcgtggagggggcgatcgatgcaatcgtcaggcatggaggtcgggaagaggacattactctggtgcgcgtacccggctcatgggagatacctgtggccgctggggaacttgcccgaaaagaggatatcgacgcagttattgccatcggagtcctgataagaggcgctaccccacacttcgattacattgccagtgaagtgagcaagggtttggcagacctctccctggagttaaggaaacccatcacatttggggtgatcaccgcggatactctggagcaagctattgaacgggccggcacgaagcatggaaacaaaggctgggaggcagccctctctgctatcgaaatggccaatcttttcaagagcctgcgttgaggactagtccctgttcccagagcccacttttttttctttttttgaaataaaatagcctgtctttcagatctaaaaaaaaaaaaaaaaaaaaaaaaaaaaaaaaaaaaaaaaaaaaaaaaaaaaaaaaaaaaaaaaaaaaaaaaaaaaaaaaaaaaaaaaaaaaaaaaaaaa

SEQ ID NO: 1040 - RNA, 1670 nt, synthetic construct
  misc_feature 1..1670: note Artificial____HsIgE(1-18)_Ec(J96)-FimH(22-300_N28S_V48C_L55 C_N91S_N249Q)_Linker-PGDGN_Ec(J96)-FimG(24-37)_Linker-SGG_L umSynth(1-154_C37A_N102D) mRNA opt3
  source 1..1670: mol_type = other RNA
aggagagtcccgcagtcggcgtccagcggctctgcttgttcgtgtgtgtgtcgttgcaggccttattcaagcttaccatggactggacctggatcctgttcctcgtggccgctgcaacaagagtccacagctttgcctgcaagactgcgtccggcacggctattcccatagggggaggttctgccaacgtttacgtgaatcttgcaccttgtgtaaacgtgggccagaattgcgtcgtggatctgtcaacccaaatcttctgtcataacgactatccagagacaattactgattacgttaccttgcagagggggagtgcctatggaggcgtgttaagctccttttctggtacagtcaaatactcggggtcaagctatccgttccccaccacgagtgaaacacctcgggtggtatacaattcccgcaccgacaagccatggcccgttgctctgtatctaacgcctgtgtctagcgcaggaggcgtcgccatcaaagctggctccctcattgccgtgctgatccttcgacagactaacaattacaactcagatgactttcagttcgtgtggaatatatacgcgaacaatgatgtcgttgtgccaaccgggggatgcgacgtaagtgcacgtgatgtgacagtcactctgcccgactatcctggtagcgtgccaatcccgttgaccgtttactgtgccaagtctcaaaacctcggctattacctgtccgggacaaccgctgatgccggaaattcaatttttacgaacactgctagcttcagtcccgcacagggcgtgggtgtccagctgacaagacaggggaccatcattcctgccaataacactgtgtctctcggagcggtaggcacatccgccgttagcttaggcctgaccgcaaactatgctaggactgggggacaagtgaccgccggtaatgtccagtcgatcataggcgtgacatttgtctaccagccaggggacggaaacgctgatgtgactattaccgttaatggcaaagtggtagccaagtctggtgggatgcagatctatgagggcaagctaacagcagaaggattgcggttcggcattgtcgcctcccgctttaaccacgctctggtggacagacttgttgagggggcgatcgacgcaatcgtgaggcatggaggtcgggaagaggatattactctcgtccgcgtgcccggctcatgggagatacctgtagccgctggggaactggcccgaaaagaggacatcgatgcagtgattgccatcggagttcttataagaggcgctaccccacacttcgactacattgccagtgaagtcagcaagggtctggcagatttgtccctcgagctgaggaaacccatcacatttggggtgatcaccgcggacactttagagcaagctattgaacgggccggcacgaagcatggaaataaaggctgggaggcagccctgtctgctatcgaaatggccaacctcttcaagagccttcgttgaggactagtccctgttcccagagcccacttttttttctttttttgaaataaaatagcctgtctttcagatctaaaaaaaaaaaaaaaaaaaaaaaaaaaaaaaaaaaaaaaaaaaaaaaaaaaaaaaaaaaaaaaaaaaaaaaaaaaaaaaaaaaaaaaaaaaaaaaaaaaa

SEQ ID NO: 1041 - RNA, 1670 nt, synthetic construct
  misc_feature 1..1670: note Artificial____HsIgE(1-18)_Ec(J96)-FimH(22-300_F165V)_Linker -PGDGN_Ec(J96)-FimG(24-37)_Linker-SGG_LumSynth(1-154_C37A_N 102D) mRNA opt3
  source 1..1670: mol_type = other RNA
aggagagtcccgcagtcggcgtccagcggctctgcttgttcgtgtgtgtgtcgttgcaggccttattcaagcttaccatggactggacctggatcctgttcctcgtggccgctgcaacaagagtccacagctttgcctgcaagactgcgaacggcacggctattcccatagggggaggttccgccaatgtttacgtgaaccttgcacctgtagtgaatgtcggccagaacctggtggttgatttgtctacccaaatcttctgtcataatgactatccagagacaattactgattacgtgaccttacagagggggtcagcctatggaggcgtcctgagtaactttagcggtacagtgaaatactccgggtcttcgtatccgttccccaccacttcagaaacacctcgggtagtttacaatagccgcaccgacaagccatggcccgtggctctatatctcacgcctgtcagttccgcaggaggcgtggccatcaaagctggctctctgattgccgtgcttatcctgcgacagactaacaattacaacagcgatgactttcaggtcgtttggaatatatacgcgaacaatgatgtggtagtgccaaccgggggatgcgacgtctccgcacgtgatgtgacagttactttgcccgactatcctggttcagtgccaatcccgctcaccgtctactgtgccaagagtcaaaacctgggctattacctgagcgggacaaccgctgatgccggaaattctattttcacgaacactgcatccttttcacccgctcagggcgtgggtgtacagctcacaagaaacgggaccatcattcctgccaataacactgttagcttaggagcggtgggcacaagtgccgtctctctgggccttaccgcaaattatgctaggaccgggggacaggtgacggccggtaacgtccaatccatcataggcgtgacattcgtttaccagccaggggacggaaatgctgatgtgactattaccgtaaacggcaaagtcgtggccaagagcggtgggatgcagatctatgagggcaagttgacagcagaaggactgcggtttggcattgttgcctcgcgcttcaatcacgctctagtggacagactcgtcgagggggcgatcgacgcaatcgtgaggcatggaggtcgggaagaggatattactctggtacgcgtgcccggctcttgggagatacctgttgccgctggggaacttgcccgaaaagaggacatcgatgcagtcattgccatcggagtgctgataagaggcgctaccccacactttgactacattgcctccgaagtgtcaaagggtttggcagatctcagtctggagttaaggaaacccatcacattcggggtcatcaccgcggacactctggagcaggctattgaacgggccggcacgaagcatggaaacaaaggctgggaggcagccctcagcgctatcgaaatggccaatctttttaagtccctgcgttgaggactagtccctgttcccagagcccacttttttttctttttttgaaataaaatagcctgtctttcagatctaaaaaaaaaaaaaaaaaaaaaaaaaaaaaaaaaaaaaaaaaaaaaaaaaaaaaaaaaaaaaaaaaaaaaaaaaaaaaaaaaaaaaaaaaaaaaaaaaaaa

SEQ ID NO: 1042 - RNA, 1697 nt, synthetic construct
  misc_feature 1..1697: note Artificial____HsIgE(1-18)_Ec(J96)-FimH(22-300_N28S_N91S_N24 9Q)_Linker-PGDGN_Ec(J96)-FimG(24-37)_Linker-SGG_Ferritin(5- 167_N19Q) mRNA opt3
  source 1..1697: mol_type = other RNA
aggagagtcccgcagtcggcgtccagcggctctgcttgttcgtgtgtgtgtcgttgcaggccttattcaagcttaccatggactggacctggatcctgttcctcgtggccgctgcaacaagagtccacagctttgcctgcaagactgcgtccggcacggctattcccatagggggaggttctgccaacgtttacgtgaatcttgcacctgtagtgaacgtcggccagaatctggtggttgatttgtcaacccaaatcttctgtcataacgactatccagagacaattactgattacgtgaccttacagagggggagtgcctatggaggcgtcctgagctccttttctggtacagtgaaatactcggggtcaagctatccgttccccaccacgagtgaaacacctcgggtagtttacaattcccgcaccgacaagccatggcccgtggctctatatctcacgcctgtctctagcgcaggaggcgtggccatcaaagctggctccctgattgccgtgcttatcctgcgacagactaacaattacaactcagatgactttcagttcgtctggaatatatacgcgaacaatgatgttgtggtaccaaccgggggatgcgacgtgagtgcacgtgatgtcacagtgactttgcccgactatcctggtagcgttccaatcccgctcaccgtgtactgtgccaagtctcaaaacctgggctattacctgtccgggacaaccgctgatgccggaaattcaatttttacgaacactgctagcttcagtcccgcacagggcgtcggtgtgcagctcacaagacaggggaccatcattcctgccaataacactgtatctttaggagcggttggcacatccgccgtgagcctgggccttaccgcaaactatgctaggactgggggacaagtcaccgccggtaatgtgcagtcgatcataggcgtcacatttgtgtaccagccaggggacggaaacgctgatgttactattaccgtgaatggcaaagtagtcgccaagtctggtggggacatcattaagttgctgaacgaacaggtgaataaagagatgcaatcctcaaacctatatatgagtatgagctcctggtgctacacacactctctcgacggcgcaggactgttcctttttgatcatgccgctgaggaatacgagcacgcgaagaaactgatcatcttcttgaatgagaacaatgttcccgtgcagctcactagcatttcagcacctgaacataagtttgagggcctgacccagatattccaaaaagcctatgaacacgagcagcacatcagtgagtccattaacaatatcgtcgaccatgctataaagagcaaggatcacgccacattcaactttttacagtggtacgtggcagaacagcatgaggaagaggtactgttcaaagacattctcgataagatcgaacttatcgggaatgagaaccacggactgtatttggccgaccaatacgtgaaaggtattgctaagtctcggaaatcatgaggactagtccctgttcccagagcccacttttttttctttttttgaaataaaatagcctgtctttcagatctaaaaaaaaaaaaaaaaaaaaaaaaaaaaaaaaaaaaaaaaaaaaaaaaaaaaaaaaaaaaaaaaaaaaaaaaaaaaaaaaaaaaaaaaaaaaaaaaaaaa

SEQ ID NO: 1043 - RNA, 1697 nt, synthetic construct
  misc_feature 1..1697: note Artificial____HsIgE(1-18)_Ec(J96)-FimH(22-300_N28S_N91S_N24 9Q_N256D)_Linker-PGDGN_Ec(J96)-FimG(24-37)_Linker-SGG_Ferri tin(5-167_N19Q) mRNA opt3
  source 1..1697: mol_type = other RNA
aggagagtcccgcagtcggcgtccagcggctctgcttgttcgtgtgtgtgtcgttgcaggccttattcaagcttaccatggactggacctggatcctgttcctcgtggccgctgcaacaagagtccacagctttgcctgcaagactgcgtccggcacggctattcccatagggggaggttctgccaacgtttacgtgaatcttgcacctgtagtgaacgtcggccagaatctggtggttgatttgtcaacccaaatcttctgtcataacgactatccagagacaattactgattacgtgaccttacagagggggagtgcctatggaggcgtcctgagctccttttctggtacagtgaaatactcggggtcaagctatccgttccccaccacgagtgaaacacctcgggtagtttacaattcccgcaccgacaagccatggcccgtggctctatatctcacgcctgtctctagcgcaggaggcgtggccatcaaagctggctccctgattgccgtgcttatcctgcgacagactaacaattacaactcagatgactttcagttcgtctggaatatatacgcgaacaatgatgttgtggtaccaaccgggggatgcgacgtgagtgcacgtgatgtcacagtgactttgcccgactatcctggtagcgttccaatcccgctcaccgtgtactgtgccaagtctcaaaacctgggctattacctgtccgggacaaccgctgatgccggaaattcaatttttacgaacactgctagcttcagtcccgcacagggcgtcggtgtgcagctcacaagacaggggaccatcattcctgccgacaatactgtatctttaggagcggttggcacatccgccgtgagcctgggccttaccgcaaactatgctaggactgggggacaagtcaccgccggtaacgtgcagtcgatcataggcgtcacatttgtgtaccagccaggggatggaaatgctgacgttactattaccgtgaacggcaaagtagtcgccaagtctggtggggacatcattaagttgctgaatgaacaggtgaacaaagagatgcaatcctcaaatctatatatgagtatgagctcctggtgctacacacactctctcgatggcgcaggactgttcctttttgaccatgccgctgaggaatacgagcacgcgaagaaactgatcatcttcttgaacgagaataacgttcccgtgcagctcactagcatttcagcacctgaacataagtttgagggcctgacccagatattccaaaaagcctatgaacacgagcagcacatcagtgagtccattaataacatcgtcgatcatgctataaagagcaaggaccacgccacattcaactttttacagtggtacgtggcagaacagcatgaggaagaggtactgttcaaagatattctcgacaagatcgaacttatcgggaatgagaatcacggactgtatttggccgatcaatacgtgaaaggtattgctaagtctcggaaatcatgaggactagtccctgttcccagagcccacttttttttctttttttgaaataaaatagcctgtctttcagatctaaaaaaaaaaaaaaaaaaaaaaaaaaaaaaaaaaaaaaaaaaaaaaaaaaaaaaaaaaaaaaaaaaaaaaaaaaaaaaaaaaaaaaaaaaaaaaaaaaaa

SEQ ID NO: 1044 - RNA, 1697 nt, synthetic construct
  misc_feature 1..1697: note Artificial____HsIgE(1-18)_Ec(J96)-FimH(22-300_N28S_V48C_L55 C_N91S_N249Q)_Linker-PGDGN_Ec(J96)-FimG(24-37)_Linker-SGG_F erritin(5-167_N19Q) mRNA opt3
  source 1..1697: mol_type = other RNA
aggagagtcccgcagtcggcgtccagcggctctgcttgttcgtgtgtgtgtcgttgcaggccttattcaagcttaccatggactggacctggatcctgttcctcgtggccgctgcaacaagagtccacagctttgcctgcaagactgcgtccggcacggctattcccatagggggaggttctgccaacgtttacgtgaatcttgcaccttgtgtaaacgtgggccagaattgcgtcgtggatctgtcaacccaaatcttctgtcataacgactatccagagacaattactgattacgttaccttgcagagggggagtgcctatggaggcgtgttaagctccttttctggtacagtcaaatactcggggtcaagctatccgttccccaccacgagtgaaacacctcgggtggtatacaattcccgcaccgacaagccatggcccgttgctctgtatctaacgcctgtgtctagcgcaggaggcgtcgccatcaaagctggctccctcattgccgtgctgatccttcgacagactaacaattacaactcagatgactttcagttcgtgtggaatatatacgcgaacaatgatgtcgttgtgccaaccgggggatgcgacgtaagtgcacgtgatgtgacagtcactctgcccgactatcctggtagcgtgccaatcccgttgaccgtttactgtgccaagtctcaaaacctcggctattacctgtccgggacaaccgctgatgccggaaattcaatttttacgaacactgctagcttcagtcccgcacagggcgtgggtgtccagctgacaagacaggggaccatcattcctgccaataacactgtgtctctcggagcggtaggcacatccgccgttagcttaggcctgaccgcaaactatgctaggactgggggacaagtgaccgccggtaatgtccagtcgatcataggcgtgacatttgtctaccagccaggggacggaaacgctgatgtgactattaccgttaatggcaaagtggtagccaagtctggtggggacatcattaaacttttgaacgagcaggtcaataaggaaatgcaatcctcaaacctgtatatgagtatgagctcctggtgctacacacactctctagacggcgcaggactcttcctgtttgatcatgccgctgaggaatacgagcacgcgaagaaacttatcatcttcctgaatgagaacaatgtgcccgttcagttgactagcatttcagcacctgaacataagtttgagggcctcacccagatattccaaaaagcctatgaacacgagcagcacatcagtgagtccattaacaatatcgtggaccatgctataaagagcaaggatcacgccacattcaactttctgcagtggtacgtcgcagaacagcatgaggaagaggtgttattcaaagacattctggataagatcgaactcatcgggaatgagaaccacggactttatctggccgaccaatacgtaaaaggtattgctaagtctcggaaatcatgaggactagtccctgttcccagagcccacttttttttctttttttgaaataaaatagcctgtctttcagatctaaaaaaaaaaaaaaaaaaaaaaaaaaaaaaaaaaaaaaaaaaaaaaaaaaaaaaaaaaaaaaaaaaaaaaaaaaaaaaaaaaaaaaaaaaaaaaaaaaaa

SEQ ID NO: 1045 - RNA, 1697 nt, synthetic construct
  misc_feature 1..1697: note Artificial____HsIgE(1-18)_Ec(J96)-FimH(22-300_F165V)_Linker -PGDGN_Ec(J96)-FimG(24-37)_Linker-SGG_Ferritin(5-167_N19Q) mRNA opt3
  source 1..1697: mol_type = other RNA
aggagagtcccgcagtcggcgtccagcggctctgcttgttcgtgtgtgtgtcgttgcaggccttattcaagcttaccatggactggacctggatcctgttcctcgtggccgctgcaacaagagtccacagctttgcctgcaagactgcgaacggcacggctattcccatagggggaggttccgccaatgtttacgtgaaccttgcacctgtagtgaatgtcggccagaacctggtggttgatttgtctacccaaatcttctgtcataatgactatccagagacaattactgattacgtgaccttacagagggggtcagcctatggaggcgtcctgagtaactttagcggtacagtgaaatactccgggtcttcgtatccgttccccaccacttcagaaacacctcgggtagtttacaatagccgcaccgacaagccatggcccgtggctctatatctcacgcctgtcagttccgcaggaggcgtggccatcaaagctggctctctgattgccgtgcttatcctgcgacagactaacaattacaacagcgatgactttcaggtcgtttggaatatatacgcgaacaatgatgtggtagtgccaaccgggggatgcgacgtctccgcacgtgatgtgacagttactttgcccgactatcctggttcagtgccaatcccgctcaccgtctactgtgccaagagtcaaaacctgggctattacctgagcgggacaaccgctgatgccggaaattctattttcacgaacactgcatccttttcacccgctcagggcgtgggtgtacagctcacaagaaacgggaccatcattcctgccaataacactgttagcttaggagcggtgggcacaagtgccgtctctctgggccttaccgcaaattatgctaggaccgggggacaggtgacggccggtaacgtccaatccatcataggcgtgacattcgtttaccagccaggggacggaaatgctgatgtgactattaccgtaaacggcaaagtcgtggccaagagcggtggggacatcattaagttgctgaatgagcaggttaacaaagaaatgcagtcgtctaatctatatatgtccatgtcaagttggtgctacacacacagcctcgacggcgcaggactgtttcttttcgatcatgccgctgaggaatacgagcacgcgaagaaactgatcatctttttgaacgagaataacgtgcccgtccaactcacttccatttctgcacctgaacataagttcgagggcctgacccagatatttcagaaagcctatgaacacgagcaacacatcagcgagtcaattaataacatcgtggaccatgctataaagagtaaggatcacgccacattcaatttcttacagtggtacgtagcagaacagcatgaggaagaggtgctgtttaaagacattctcgataagatcgaacttatcgggaacgagaaccacggactgtatttggccgaccagtacgttaaaggtattgctaagtcccggaaaagctgaggactagtccctgttcccagagcccacttttttttctttttttgaaataaaatagcctgtctttcagatctaaaaaaaaaaaaaaaaaaaaaaaaaaaaaaaaaaaaaaaaaaaaaaaaaaaaaaaaaaaaaaaaaaaaaaaaaaaaaaaaaaaaaaaaaaaaaaaaaaaa

SEQ ID NO: 1046 - RNA, 974 nt, synthetic construct
  misc_feature 1..974: note Artificial____Ec(J96)-FimC(1-36)_Ec(J96)-FimC(37-241) mRNA opt3
  source 1..974: mol_type = other RNA
aggagagtcccgcagtcggcgtccagcggctctgcttgttcgtgtgtgtgtcgttgcaggccttattcaagcttaccatgagcaacaagaacgtgaacgtgcggaagtcccaagagatcaccttctgtctgctggccggcatcctgatgtttatggccatgatggtggccggcagagccgaagctggtgttgctcttggagccaccagagtgatctacccagccggccagaaacaggtgcagctggccgtgaccaacaacgacgagaacagcacctacctgatccagagctgggtcgagaatgccgacggcgtgaaggacggcagattcatcgttacccctccactgttcgccatgaagggcaagaaagagaacaccctgcggatcctggacgccaccaacaatcagctgccccaggacagagaaagcctgttctggatgaacgtgaaggctatccccagcatggacaagagcaagctgaccgagaataccctgcagctcgccatcatcagccggatcaagctgtactacagacccgccaaactggccctgcctccagatcaggctgccgagaaactgcggttcagaagaagcgccaacagcctgacactgatcaaccccacaccttactacctgaccgtgaccgagctgaacgccggcacaagagtgctggaaaatgccctggttcctcctatgggcgagagcaccgtgaagctgccatctgatgccggctccaacatcacctaccggaccatcaacgactacggcgccctgacacctaagatgaccggcgtgatggaatgaggactagtccctgttcccagagcccacttttttttctttttttgaaataaaatagcctgtctttcagatctaaaaaaaaaaaaaaaaaaaaaaaaaaaaaaaaaaaaaaaaaaaaaaaaaaaaaaaaaaaaaaaaaaaaaaaaaaaaaaaaaaaaaaaaaaaaaaaaaaaa

SEQ ID NO: 1047 - RNA, 920 nt, synthetic construct
  misc_feature 1..920: note = Artificial____HsIgE(1-18)_Ec(J96)-FimC(37-241) mRNA opt3
  source 1..920: mol_type = other RNA
aggagagtcccgcagtcggcgtccagcggctctgcttgttcgtgtgtgtgtcgttgcaggccttattcaagcttaccatggactggacctggatcctgtttctggtggccgctgccacaagagtgcatagcggagttgctctgggagccaccagagtgatctatcctgccggccagaagcaggttcagctggccgtgaccaacaacgacgagaacagcacctacctgatccagagctgggtcgagaatgccgacggcgtgaaggacggcagattcatcgttacccctccactgttcgccatgaagggcaagaaagagaacaccctgcggatcctggacgccaccaacaatcagctgccccaggacagagaaagcctgttctggatgaacgtgaaggctatccccagcatggacaagagcaagctgaccgagaataccctgcagctggccatcatcagccggatcaagctgtactacagacccgccaaactggccctgcctccagatcaggctgccgagaaactgcggttcagaagaagcgccaacagcctgacactgatcaaccccacaccttactacctgaccgtgaccgagctgaacgccggaaccagagtgctggaaaatgccctggttcctcctatgggcgagagcaccgtgaagctgccatctgatgccggcagcaacatcacctaccggaccatcaacgactacggcgccctgacacctaagatgaccggcgtgatggaatgaggactagtccctgttcccagagcccacttttttttctttttttgaaataaaatagcctgtctttcagatctaaaaaaaaaaaaaaaaaaaaaaaaaaaaaaaaaaaaaaaaaaaaaaaaaaaaaaaaaaaaaaaaaaaaaaaaaaaaaaaaaaaaaaaaaaaaaaaaaaaa

SEQ ID NO: 1048 - RNA, 1151 nt, synthetic construct
  misc_feature 1..1151: note Artificial____Ec(J96)-FimH(1-21)_Ec(J96)-FimH(22-300) mRNA opt3
  source 1..1151: mol_type = other RNA
aggagagtcccgcagtcggcgtccagcggctctgcttgttcgtgtgtgtgtcgttgcaggccttattcaagcttaccatgaagcgcgtgatcaccctgtttgccgtgctgcttatgggctggagcgtgaacgcctggtcctttgcctgcaagaccgccaacggaaccgccattcctatcggcggaggatccgccaatgtgtatgtgaatctggcccctgtggtcaacgtgggccagaacctggtggtggatctgagcacccagatcttttgccacaacgactaccccgagacaatcaccgactacgtgaccctgcagagaggctctgcttacggcggcgtgctgagcaatttttccggcaccgtgaagtacagcggcagcagctacccatttcctaccaccagcgagacacccagagtggtgtacaacagcagaaccgacaagccctggcctgtggctctgtacctgacacctgttagctctgctggcggcgtggccattaaggccggatctctgatcgccgtgctgatcctgagacagaccaacaactacaacagcgacgacttccagttcgtgtggaacatctacgccaacaacgacgtggtggtgcctacaggcggctgtgatgtgtctgccagagatgtgaccgtgacactgcctgactaccctggcagcgtgccaattcctctgaccgtgtactgtgccaagagccagaatctgggctactacctgagcggcacaacagccgatgccggcaacagcatcttcaccaacaccgccagcttcagccctgctcaaggtgttggagtgcagctgacccggaacggcacaatcatccccgccaacaataccgtgtctctgggcgctgttggcaccagcgctgtttctctgggactgaccgccaattacgccagaacaggcggacaagtgaccgccggcaatgtgcagtctatcatcggcgtgaccttcgtgtaccagtgaggactagtccctgttcccagagcccacttttttttctttttttgaaataaaatagcctgtctttcagatctaaaaaaaaaaaaaaaaaaaaaaaaaaaaaaaaaaaaaaaaaaaaaaaaaaaaaaaaaaaaaaaaaaaaaaaaaaaaaaaaaaaaaaaaaaaaaaaaaaaa

SEQ ID NO: 1049 - RNA, 1142 nt, synthetic construct
  misc_feature 1..1142: note = Artificial____HsIgE(1-18)_Ec(J96)-FimH(22-300) mRNA opt3
  source 1..1142: mol_type = other RNA
aggagagtcccgcagtcggcgtccagcggctctgcttgttcgtgtgtgtgtcgttgcaggccttattcaagcttaccatggactggacctggatcctgtttctggtggccgctgccacaagagtgcacagctttgcctgcaagaccgccaacggcaccgccattcctattggcggaggatccgccaatgtgtatgtgaatctggcccctgtggtcaacgtgggccagaacctggtggtggatctgagcacccagatcttttgccacaacgactaccccgagacaatcaccgactacgtgaccctgcagagaggctctgcttacggcggcgtgctgagcaatttttccggcaccgtgaagtacagcggcagcagctacccatttcctaccaccagcgagacacccagagtggtgtacaacagcagaaccgacaagccctggcctgtggctctgtacctgacacctgttagctctgctggcggcgtggccattaaggccggatctctgattgccgtgctgatcctgcggcagaccaacaactacaacagcgacgacttccagttcgtgtggaacatctacgccaacaacgacgtggtggtgcctacaggcggctgtgatgtgtctgccagagatgtgaccgtgacactgcctgactaccctggcagcgtgccaattcctctgaccgtgtactgtgccaagagccagaatctgggctactacctgagcggcacaacagccgatgccggcaacagcatcttcaccaacaccgccagcttcagccctgctcaaggtgttggagtgcagctgacccggaacggcacaatcatccccgccaacaataccgtgtctctgggcgctgttggcaccagcgctgtttctctgggactgaccgccaattacgccagaacaggcggacaagtgaccgccggcaatgtgcagtctatcatcggcgtgaccttcgtgtaccagtgaggactagtccctgttcccagagcccacttttttttctttttttgaaataaaatagcctgtctttcagatctaaaaaaaaaaaaaaaaaaaaaaaaaaaaaaaaaaaaaaaaaaaaaaaaaaaaaaaaaaaaaaaaaaaaaaaaaaaaaaaaaaaaaaaaaaaaaaaaaaaa

SEQ ID NO: 1050 - RNA, 1148 nt, synthetic construct
  misc_feature 1..1148: note = Artificial____MmIgK(1-20)_Ec(J96)-FimH(22-300) mRNA opt3
  source 1..1148: mol_type = other RNA
aggagagtcccgcagtcggcgtccagcggctctgcttgttcgtgtgtgtgtcgttgcaggccttattcaagcttaccatggaaaccgacacactgctgctgtgggtgctgcttctttgggtgcccggctctacaggctttgcctgcaagacagccaacggcaccgccattcctatcggcggaggatccgccaatgtgtatgtgaatctggcccctgtggtcaacgtgggccagaacctggtggtggatctgagcacccagatcttttgccacaacgactaccccgagacaatcaccgactacgtgaccctgcagagaggctctgcttacggcggcgtgctgagcaatttttccggcaccgtgaagtacagcggcagcagctacccatttcctaccaccagcgagacacccagagtggtgtacaacagcagaaccgacaagccctggcctgtggctctgtacctgacacctgttagctctgctggcggcgtggccattaaggccggatctctgattgccgtgctgatcctgcggcagaccaacaactacaacagcgacgacttccagttcgtgtggaacatctacgccaacaacgacgtggtggtgcctacaggcggctgtgatgtgtctgccagagatgtgaccgtgacactgcctgactaccctggcagcgtgccaattcctctgaccgtgtactgtgccaagagccagaatctgggctactacctgagcggcacaacagccgatgccggcaacagcatcttcaccaacaccgccagcttcagccctgctcaaggtgttggagtgcagctgacccggaacggcacaatcatccccgccaacaataccgtgtctctgggcgctgttggcaccagcgctgtttctctgggactgaccgccaactacgccagaacaggcggacaagtgacagccggcaatgtgcagtctatcatcggcgtgaccttcgtgtaccagtgaggactagtccctgttcccagagcccacttttttttctttttttgaaataaaatagcctgtctttcagatctaaaaaaaaaaaaaaaaaaaaaaaaaaaaaaaaaaaaaaaaaaaaaaaaaaaaaaaaaaaaaaaaaaaaaaaaaaaaaaaaaaaaaaaaaaaaaaaaaaaa

SEQ ID NO: 1051 - RNA, 1208 nt, synthetic construct
  misc_feature 1..1208: note Artificial____Ec(J96)-FimH(1-21)_Ec(J96)-FimH(22-300)_Linke r-PGDGN_Ec(J96)-FimG(24-37) mRNA opt3
  source 1..1208: mol_type = other RNA
aggagagtcccgcagtcggcgtccagcggctctgcttgttcgtgtgtgtgtcgttgcaggccttattcaagcttaccatgaagcgcgtgatcaccctgtttgccgtgctgcttatgggctggagcgtgaacgcctggtcctttgcctgcaagaccgccaacggaaccgccattcctatcggcggaggatccgccaatgtgtatgtgaatctggcccctgtggtcaacgtgggccagaacctggtggtggatctgagcacccagatcttttgccacaacgactaccccgagacaatcaccgactacgtgaccctgcagagaggctctgcttacggcggcgtgctgagcaatttttccggcaccgtgaagtacagcggcagcagctacccatttcctaccaccagcgagacacccagagtggtgtacaacagcagaaccgacaagccctggcctgtggctctgtacctgacacctgttagctctgctggcggcgtggccattaaggccggatctctgatcgccgtgctgatcctgagacagaccaacaactacaacagcgacgacttccagttcgtgtggaacatctacgccaacaacgacgtggtggtgcctacaggcggctgtgatgtgtctgccagagatgtgaccgtgacactgcctgactaccctggcagcgtgccaattcctctgaccgtgtactgtgccaagagccagaatctgggctactacctgagcggcacaacagccgatgccggcaacagcatcttcaccaacaccgccagcttcagccctgctcaaggtgttggagtgcagctgacccggaacggcacaatcatccccgccaacaataccgtgtctctgggcgctgttggcaccagcgctgtttctctgggactgaccgccaattacgccagaacaggcggacaagtgaccgccggcaatgtgcagtctatcatcggcgtgaccttcgtgtaccagcctggcgacggaaatgccgacgtgaccatcaccgtgaacggaaaggtggtggccaagtgaggactagtccctgttcccagagcccacttttttttctttttttgaaataaaatagcctgtctttcagatctaaaaaaaaaaaaaaaaaaaaaaaaaaaaaaaaaaaaaaaaaaaaaaaaaaaaaaaaaaaaaaaaaaaaaaaaaaaaaaaaaaaaaaaaaaaaaaaaaaaa

SEQ ID NO: 1052 - RNA, 1199 nt, synthetic construct
  misc_feature 1..1199: note Artificial____HsIgE(1-18)_Ec(J96)-FimH(22-300)_Linker-PGDGN _Ec(J96)-FimG(24-37) mRNA opt3
  source 1..1199: mol_type = other RNA
aggagagtcccgcagtcggcgtccagcggctctgcttgttcgtgtgtgtgtcgttgcaggccttattcaagcttaccatggactggacctggatcctgtttctggtggccgctgccacaagagtgcacagctttgcctgcaagaccgccaacggcaccgccattcctattggcggaggatccgccaatgtgtatgtgaatctggcccctgtggtcaacgtgggccagaacctggtggtggatctgagcacccagatcttttgccacaacgactaccccgagacaatcaccgactacgtgaccctgcagagaggctctgcttacggcggcgtgctgagcaatttttccggcaccgtgaagtacagcggcagcagctacccatttcctaccaccagcgagacacccagagtggtgtacaacagcagaaccgacaagccctggcctgtggctctgtacctgacacctgttagctctgctggcggcgtggccattaaggccggatctctgattgccgtgctgatcctgcggcagaccaacaactacaacagcgacgacttccagttcgtgtggaacatctacgccaacaacgacgtggtggtgcctacaggcggctgtgatgtgtctgccagagatgtgaccgtgacactgcctgactaccctggcagcgtgccaattcctctgaccgtgtactgtgccaagagccagaatctgggctactacctgagcggcacaacagccgatgccggcaacagcatcttcaccaacaccgccagcttcagccctgctcaaggtgttggagtgcagctgacccggaacggcacaatcatccccgccaacaataccgtgtctctgggcgctgttggcaccagcgctgtttctctgggactgaccgccaattacgccagaacaggcggacaagtgaccgccggcaatgtgcagtctatcatcggcgtgaccttcgtgtaccagcctggcgacggaaatgccgacgtgaccatcaccgtgaacggaaaggtggtggccaagtgaggactagtccctgttcccagagcccacttttttttctttttttgaaataaaatagcctgtctttcagatctaaaaaaaaaaaaaaaaaaaaaaaaaaaaaaaaaaaaaaaaaaaaaaaaaaaaaaaaaaaaaaaaaaaaaaaaaaaaaaaaaaaaaaaaaaaaaaaaaaaa

SEQ ID NO: 1053 - RNA, 1205 nt, synthetic construct
  misc_feature 1..1205: note Artificial____HsIgE(1-18)_Ec(J96)-FimH(22-300)_Linker-G4SGG _Ec(J96)-FimG(24-37) mRNA opt3
  source 1..1205: mol_type = other RNA
aggagagtcccgcagtcggcgtccagcggctctgcttgttcgtgtgtgtgtcgttgcaggccttattcaagcttaccatggactggacctggatcctgtttctggtggccgctgccacaagagtgcacagctttgcctgcaagaccgccaacggcaccgccattcctattggcggaggatccgccaatgtgtatgtgaatctggcccctgtggtcaacgtgggccagaacctggtggtggatctgagcacccagatcttttgccacaacgactaccccgagacaatcaccgactacgtgaccctgcagagaggctctgcttacggcggcgtgctgagcaatttttccggcaccgtgaagtacagcggcagcagctacccatttcctaccaccagcgagacacccagagtggtgtacaacagcagaaccgacaagccctggcctgtggctctgtacctgacacctgttagctctgctggcggcgtggccattaaggccggatctctgattgccgtgctgatcctgcggcagaccaacaactacaacagcgacgacttccagttcgtgtggaacatctacgccaacaacgacgtggtggtgcctacaggcggctgtgatgtgtctgccagagatgtgaccgtgacactgcctgactaccctggcagcgtgccaattcctctgaccgtgtactgtgccaagagccagaatctgggctactacctgagcggcacaacagccgatgccggcaacagcatcttcaccaacaccgccagcttcagccctgctcaaggtgttggagtgcagctgacccggaacggcacaatcatccccgccaacaataccgtgtctctgggcgctgttggcaccagcgctgtttctctgggactgaccgccaattacgccagaacaggcggacaagtgaccgccggcaatgtgcagtctatcatcggcgtgaccttcgtgtaccaaggcggaggcggatctggcggagccgatgtgacaatcacagtgaacggaaaggtggtggccaagtgaggactagtccctgttcccagagcccacttttttttctttttttgaaataaaatagcctgtctttcagatctaaaaaaaaaaaaaaaaaaaaaaaaaaaaaaaaaaaaaaaaaaaaaaaaaaaaaaaaaaaaaaaaaaaaaaaaaaaaaaaaaaaaaaaaaaaaaaaaaaaa

SEQ ID NO: 1054 - RNA, 1205 nt, synthetic construct
  misc_feature 1..1205: note Artificial____MmIgK(1-20)_Ec(J96)-FimH(22-300)_Linker-PGDGN _Ec(J96)-FimG(24-37) mRNA opt3
  source 1..1205: mol_type = other RNA
aggagagtcccgcagtcggcgtccagcggctctgcttgttcgtgtgtgtgtcgttgcaggccttattcaagcttaccatggaaaccgacacactgctgctgtgggtgctgcttctttgggtgcccggctctacaggctttgcctgcaagacagccaacggcaccgccattcctatcggcggaggatccgccaatgtgtatgtgaatctggcccctgtggtcaacgtgggccagaacctggtggtggatctgagcacccagatcttttgccacaacgactaccccgagacaatcaccgactacgtgaccctgcagagaggctctgcttacggcggcgtgctgagcaatttttccggcaccgtgaagtacagcggcagcagctacccatttcctaccaccagcgagacacccagagtggtgtacaacagcagaaccgacaagccctggcctgtggctctgtacctgacacctgttagctctgctggcggcgtggccattaaggccggatctctgattgccgtgctgatcctgcggcagaccaacaactacaacagcgacgacttccagttcgtgtggaacatctacgccaacaacgacgtggtggtgcctacaggcggctgtgatgtgtctgccagagatgtgaccgtgacactgcctgactaccctggcagcgtgccaattcctctgaccgtgtactgtgccaagagccagaatctgggctactacctgagcggcacaacagccgatgccggcaacagcatcttcaccaacaccgccagcttcagccctgctcaaggtgttggagtgcagctgacccggaacggcacaatcatccccgccaacaataccgtgtctctgggcgctgttggcaccagcgctgtttctctgggactgaccgccaactacgccagaacaggcggacaagtgacagccggcaatgtgcagtctatcatcggcgtgaccttcgtgtaccagcctggcgacggaaatgccgacgtgaccatcaccgtgaacggaaaggtggtggccaagtgaggactagtccctgttcccagagcccacttttttttctttttttgaaataaaatagcctgtctttcagatctaaaaaaaaaaaaaaaaaaaaaaaaaaaaaaaaaaaaaaaaaaaaaaaaaaaaaaaaaaaaaaaaaaaaaaaaaaaaaaaaaaaaaaaaaaaaaaaaaaaa

SEQ ID NO: 1055 - RNA, 1205 nt, synthetic construct
  misc_feature 1..1205: note Artificial____MmIgK(1-20)_Ec(536)-FimH(22-300)_Linker-PGDGN _Ec(J96)-FimG(24-37) mRNA opt3
  source 1..1205: mol_type = other RNA
aggagagtcccgcagtcggcgtccagcggctctgcttgttcgtgtgtgtgtcgttgcaggccttattcaagcttaccatggaaaccgacacactgctgctgtgggtgctgcttctttgggtgcccggctctacaggctttgcctgcaagacagccaacggcaccgccattcctatcggcggaggatccgccaatgtgtatgtgaatctggcccctgccgtgaacgtgggccagaatctggtggtggatctgagcacccagatcttttgccacaacgactaccccgagacaatcaccgactacgtgaccctgcagagaggctctgcttacggcggagtgctgagcagctttagcggcaccgtgaagtacaacggcagcagctacccatttcctaccaccagcgagacacccagagtggtgtacaacagcagaaccgacaagccctggcctgtggctctgtacctgacacctgttagctctgctggcggcgtggccattaaggccggatctctgattgccgtgctgatcctgcggcagaccaacaactacaacagcgacgacttccagttcgtgtggaacatctacgccaacaacgacgtggtggtgcctacaggcggctgtgatgtgtctgccagagatgtgaccgtgacactgcctgactaccctggcagcgtgccaattcctctgaccgtgtactgtgccaagagccagaacctgggctactacctgtctggcacaacagccgatgccggcaacagcatcttcaccaacacagccagcttcagccccgctcaaggtgttggagtgcagctgaccagaaacggcacaatcatccccgccaacaataccgtgtctctgggcgctgttggcaccagcgctgtttctctgggactgaccgccaactacgccagaacaggcggacaagtgacagccggcaatgtgcagtctatcatcggcgtgaccttcgtgtaccagcctggcgacggaaatgccgacgtgaccatcaccgtgaacggaaaggtggtggccaagtgaggactagtccctgttcccagagcccacttttttttctttttttgaaataaaatagcctgtctttcagatctaaaaaaaaaaaaaaaaaaaaaaaaaaaaaaaaaaaaaaaaaaaaaaaaaaaaaaaaaaaaaaaaaaaaaaaaaaaaaaaaaaaaaaaaaaaaaaaaaaaa

SEQ ID NO: 1056 - RNA, 1229 nt, synthetic construct
  misc_feature 1..1229: note Artificial____HsIgE(1-18)_Ec(J96)-FimH(22-300)_Linker-(G4S) 3_Ec(J96)-FimC(135-148) mRNA opt3
  source 1..1229: mol_type = other RNA
aggagagtcccgcagtcggcgtccagcggctctgcttgttcgtgtgtgtgtcgttgcaggccttattcaagcttaccatggactggacctggatcctgtttctggtggccgctgccacaagagtgcacagctttgcctgcaagaccgccaacggcaccgccattcctattggcggaggatccgccaatgtgtatgtgaatctggcccctgtggtcaacgtgggccagaacctggtggtggatctgagcacccagatcttttgccacaacgactaccccgagacaatcaccgactacgtgaccctgcagagaggctctgcttacggcggcgtgctgagcaatttttccggcaccgtgaagtacagcggcagcagctacccatttcctaccaccagcgagacacccagagtggtgtacaacagcagaaccgacaagccctggcctgtggctctgtacctgacacctgttagctctgctggcggcgtggccattaaggccggatctctgattgccgtgctgatcctgcggcagaccaacaactacaacagcgacgacttccagttcgtgtggaacatctacgccaacaacgacgtggtggtgcctacaggcggctgtgatgtgtctgccagagatgtgaccgtgacactgcctgactaccctggcagcgtgccaattcctctgaccgtgtactgtgccaagagccagaatctgggctactacctgagcggcacaacagccgatgccggcaacagcatcttcaccaacaccgccagcttcagccctgctcaaggtgttggagtgcagctgacccggaacggcacaatcatccccgccaacaataccgtgtctctgggcgctgttggcaccagcgctgtttctctgggactgaccgccaattacgccagaacaggcggacaagtgaccgccggcaatgtgcagtctatcatcggcgtgaccttcgtgtaccaaggcggaggcggatctggtggcggaggcagtggtggcggtggatctacagagaatactctgcagctggccatcatcagccggatcaagtgaggactagtccctgttcccagagcccacttttttttctttttttgaaataaaatagcctgtctttcagatctaaaaaaaaaaaaaaaaaaaaaaaaaaaaaaaaaaaaaaaaaaaaaaaaaaaaaaaaaaaaaaaaaaaaaaaaaaaaaaaaaaaaaaaaaaaaaaaaaaaa

SEQ ID NO: 1057 - RNA, 1652 nt, synthetic construct
  misc_feature 1..1652: note Artificial____LumSynth(1-154_C37A_N102D)_Linker(GGS)4-GGG_E c(J96)-FimH(22-300)_Linker-PGDGN_Ec(J96)-FimG(24-37) mRNA opt3
  source 1..1652: mol_type = other RNA
aggagagtcccgcagtcggcgtccagcggctctgcttgttcgtgtgtgtgtcgttgcaggccttattcaagcttaccatgcagatctacgagggcaagctgaccgccgagggcctgagatttggaatcgtggccagccggttcaatcacgccctggtggatagactggtggaaggcgccatcgatgccattgtcagacacggcggcagagaagaggacatcaccctcgttagagtgcccggctcttgggagattcctgtggctgctggcgagctggcccggaaagaagatatcgacgccgttatcgccatcggcgtgctgatcagaggcgccacacctcacttcgactatatcgccagcgaggtgtccaaaggcctggccgatctgagcctggaactgagaaagcccatcaccttcggcgtgatcaccgctgacacactggaacaggccattgagagagccggcaccaagcacggcaacaaaggatgggaagccgctctgtccgccatcgagatggccaacctgttcaagagcctgagaggcggctctggtggttctggcggatcaggtggaagtggcggaggatttgcctgcaagaccgccaacggaaccgccattcctatcggaggcggaagcgccaatgtgtatgtgaatctggcccctgtggtcaacgtgggccagaacctggtggtggatctgagcacccagatcttttgccacaacgactaccccgagacaatcaccgactacgtgaccctgcagagaggctctgcttacggcggagtgctgagcaatttcagcggcaccgtgaagtacagcggcagcagctacccatttcctaccaccagcgagacacccagagtggtgtacaacagcagaaccgacaagccctggcctgtggctctgtacctgacacctgttagctctgctggcggcgtggcaatcaaagccggatctctgatcgctgtgctgatcctgcggcagaccaacaactacaacagcgacgacttccagttcgtgtggaacatctacgccaacaacgacgtggtggtgcctacaggcggctgtgatgtgtctgccagagatgtgaccgtgacactgcctgactaccctggcagcgtgccaattcctctgaccgtgtactgtgccaagagccagaatctgggctactacctgagcggcacaacagccgatgccggcaacagcatcttcaccaacaccgccagcttcagccctgctcaaggtgttggagtgcagctgacccggaacggcacaatcatccccgccaacaataccgtgtctctgggcgctgttggcaccagcgctgtttctctgggactgaccgccaattacgccagaacaggcggacaagtgacagccggcaatgtgcagagcatcatcggagtgaccttcgtgtaccagcctggcgacggaaatgccgacgtgaccatcaccgtgaacggaaaggtggtggccaagtgaggactagtccctgttcccagagcccacttttttttctttttttgaaataaaatagcctgtctttcagatctaaaaaaaaaaaaaaaaaaaaaaaaaaaaaaaaaaaaaaaaaaaaaaaaaaaaaaaaaaaaaaaaaaaaaaaaaaaaaaaaaaaaaaaaaaaaaaaaaaaa

SEQ ID NO: 1058 - RNA, 1670 nt, synthetic construct
  misc_feature 1..1670: note Artificial____HsIgE(1-18)_Ec(J96)-FimH(22-300)_Linker-PGDGN _Ec(J96)-FimG(24-37)_Linker-SGG_LumSynth(1-154_C37A_N102D) mRNA opt3
  source 1..1670: mol_type = other RNA
aggagagtcccgcagtcggcgtccagcggctctgcttgttcgtgtgtgtgtcgttgcaggccttattcaagcttaccatggactggacctggatcctgtttctggtggccgctgccacaagagtgcacagctttgcctgcaagaccgccaacggcaccgccattcctattggcggaggatccgccaatgtgtatgtgaatctggcccctgtggtcaacgtgggccagaacctggtggtggatctgagcacccagatcttttgccacaacgactaccccgagacaatcaccgactacgtgaccctgcagagaggctctgcttacggcggcgtgctgagcaatttttccggcaccgtgaagtacagcggcagcagctacccatttcctaccaccagcgagacacccagagtggtgtacaacagcagaaccgacaagccctggcctgtggctctgtacctgacacctgttagctctgctggcggcgtggccattaaggccggatctctgattgccgtgctgatcctgcggcagaccaacaactacaacagcgacgacttccagttcgtgtggaacatctacgccaacaacgacgtggtggtgcctacaggcggctgtgatgtgtctgccagagatgtgaccgtgacactgcctgactaccctggcagcgtgccaattcctctgaccgtgtactgtgccaagagccagaatctgggctactacctgagcggcacaacagccgatgccggcaacagcatcttcaccaacaccgccagcttcagccctgctcaaggtgttggagtgcagctgacccggaacggcacaatcatccccgccaacaataccgtgtctctgggcgctgttggcaccagcgctgtttctctgggactgaccgccaattacgccagaacaggcggacaagtgaccgccggcaatgtgcagtctatcatcggcgtgaccttcgtgtaccagcctggcgacggaaatgccgacgtgaccatcaccgtgaacggaaaggtggtggccaagtctggcggcatgcagatctatgagggcaagctgacagccgagggcctgagatttggaatcgtggccagccggttcaatcacgccctggtggatagactggtggaaggcgccatcgatgccattgtcagacacggcggcagagaagaggacatcaccctcgttagagtgcccggctcttgggagattcctgtggctgctggcgaactggcccggaaagaggatatcgacgccgttatcgccatcggagtgctgatcagaggcgccacacctcacttcgactatatcgccagcgaggtgtccaaaggcctggccgatctgagcctggaactgagaaagcccatcaccttcggcgtgatcaccgctgacacactggaacaggccattgagagagccggcaccaagcacggaaacaaaggatgggaagccgctctgtccgccatcgagatggccaacctgttcaagagcctgcggtgaggactagtccctgttcccagagcccacttttttttctttttttgaaataaaatagcctgtctttcagatctaaaaaaaaaaaaaaaaaaaaaaaaaaaaaaaaaaaaaaaaaaaaaaaaaaaaaaaaaaaaaaaaaaaaaaaaaaaaaaaaaaaaaaaaaaaaaaaaaaaa

SEQ ID NO: 1059 - RNA, 1697 nt, synthetic construct
  misc_feature 1..1697: note Artificial____HsIgE(1-18)_Ec(J96)-FimH(22-300)_Linker-PGDGN _Ec(J96)-FimG(24-37)_Linker-SGG_Ferritin(5-167_N19Q) mRNA opt3
  source 1..1697: mol_type = other RNA
aggagagtcccgcagtcggcgtccagcggctctgcttgttcgtgtgtgtgtcgttgcaggccttattcaagcttaccatggactggacctggatcctgtttctggtggccgctgccacaagagtgcacagctttgcctgcaagaccgccaacggcaccgccattcctattggcggaggatccgccaatgtgtatgtgaatctggcccctgtggtcaacgtgggccagaacctggtggtggatctgagcacccagatcttttgccacaacgactaccccgagacaatcaccgactacgtgaccctgcagagaggctctgcttacggcggcgtgctgagcaatttttccggcaccgtgaagtacagcggcagcagctacccatttcctaccaccagcgagacacccagagtggtgtacaacagcagaaccgacaagccctggcctgtggctctgtacctgacacctgttagctctgctggcggcgtggccattaaggccggatctctgattgccgtgctgatcctgcggcagaccaacaactacaacagcgacgacttccagttcgtgtggaacatctacgccaacaacgacgtggtggtgcctacaggcggctgtgatgtgtctgccagagatgtgaccgtgacactgcctgactaccctggcagcgtgccaattcctctgaccgtgtactgtgccaagagccagaatctgggctactacctgagcggcacaacagccgatgccggcaacagcatcttcaccaacaccgccagcttcagccctgctcaaggtgttggagtgcagctgacccggaacggcacaatcatccccgccaacaataccgtgtctctgggcgctgttggcaccagcgctgtttctctgggactgaccgccaattacgccagaacaggcggacaagtgaccgccggcaatgtgcagtctatcatcggcgtgaccttcgtgtaccagcctggcgacggaaatgccgacgtgaccatcaccgtgaacggaaaggtggtggccaagtctggcggcgacatcatcaagctgctgaacgagcaagtgaacaaagagatgcagagcagcaacctgtacatgagcatgagcagctggtgctacacccacagccttgatggcgccggactgttcctgtttgaccatgccgccgaggaatacgagcacgccaagaagctgatcatcttcctgaacgagaacaacgtgcccgtccagctgaccagcatttctgcccctgagcacaagttcgagggcctgacacagatcttccagaaggcctacgaacacgagcagcacatcagcgagagcatcaacaacatcgtggaccacgccattaagagcaaggatcacgccaccttcaactttctgcagtggtacgtggccgaacagcacgaggaagaggtgctgttcaaggacatcctggacaagatcgagctgatcggcaacgagaaccacggcctgtatctggccgaccagtacgtgaagggaatcgccaagtccagaaagagctgaggactagtccctgttcccagagcccacttttttttctttttttgaaataaaatagcctgtctttcagatctaaaaaaaaaaaaaaaaaaaaaaaaaaaaaaaaaaaaaaaaaaaaaaaaaaaaaaaaaaaaaaaaaaaaaaaaaaaaaaaaaaaaaaaaaaaaaaaaaaaa

SEQ ID NO: 1060 - RNA, 1727 nt, synthetic construct
  misc_feature 1..1727: note Artificial____MmIgK(1-20)_Ec(J96)-FimH(22-300)_Linker-PGDGN _Ec(J96)-FimG(24-37)_Linker-(GGS)4_Ferritin(5-166) mRNA opt3
  source 1..1727: mol_type = other RNA
aggagagtcccgcagtcggcgtccagcggctctgcttgttcgtgtgtgtgtcgttgcaggccttattcaagcttaccatggaaaccgacacactgctgctgtgggtgctgcttctttgggtgcccggctctacaggctttgcctgcaagacagccaacggcaccgccattcctatcggcggaggatccgccaatgtgtatgtgaatctggcccctgtggtcaacgtgggccagaacctggtggtggatctgagcacccagatcttttgccacaacgactaccccgagacaatcaccgactacgtgaccctgcagagaggctctgcttacggcggcgtgctgagcaatttttccggcaccgtgaagtacagcggcagcagctacccatttcctaccaccagcgagacacccagagtggtgtacaacagcagaaccgacaagccctggcctgtggctctgtacctgacacctgttagctctgctggcggcgtggccattaaggccggatctctgattgccgtgctgatcctgcggcagaccaacaactacaacagcgacgacttccagttcgtgtggaacatctacgccaacaacgacgtggtggtgcctacaggcggctgtgatgtgtctgccagagatgtgaccgtgacactgcctgactaccctggcagcgtgccaattcctctgaccgtgtactgtgccaagagccagaatctgggctactacctgagcggcacaacagccgatgccggcaacagcatcttcaccaacaccgccagcttcagccctgctcaaggtgttggagtgcagctgacccggaacggcacaatcatccccgccaacaataccgtgtctctgggcgctgttggcaccagcgctgtttctctgggactgaccgccaactacgccagaacaggcggacaagtgacagccggcaatgtgcagtctatcatcggcgtgaccttcgtgtaccagcctggcgacggaaatgccgacgtgaccatcaccgtgaacggaaaggtggtggccaaaggcggttctggtggttctggcggaagtggcggcagcgacatcatcaagctgctgaacgagcaagtgaacaaagagatgaacagcagcaacctgtacatgagcatgagcagctggtgctacacacacagcctggatggcgccggactgttcctgtttgatcatgccgccgaggaatacgagcacgccaagaagctgatcatcttcctgaacgagaacaacgtgcccgtccagctgaccagcatttctgcccctgagcacaagttcgagggcctgacacagatcttccagaaggcctacgaacacgagcagcacatcagcgagagcatcaacaacatcgtggaccacgccatcaagagcaaggatcacgccaccttcaactttctgcagtggtacgtggccgaacagcacgaggaagaggtgctgttcaaggacatcctggacaagatcgagctgatcggcaacgagaaccacggcctgtatctggccgaccagtacgtgaagggaatcgccaagtccagaaagtgaggactagtccctgttcccagagcccacttttttttctttttttgaaataaaatagcctgtctttcagatctaaaaaaaaaaaaaaaaaaaaaaaaaaaaaaaaaaaaaaaaaaaaaaaaaaaaaaaaaaaaaaaaaaaaaaaaaaaaaaaaaaaaaaaaaaaaaaaaaaaa

SEQ ID NO: 1061 - RNA, 1370 nt, synthetic construct
  misc_feature 1..1370: note Artificial____HsIgE(1-18)_Ec(J96)-FimH(22-300)_Linker-PGDGN _Ec(J96)-FimG(24-37)_TMdomain-HA(510-566) mRNA opt3
  source 1..1370: mol_type = other RNA
aggagagtcccgcagtcggcgtccagcggctctgcttgttcgtgtgtgtgtcgttgcaggccttattcaagcttaccatggactggacctggatcctgtttctggtggccgctgccacaagagtgcacagctttgcctgcaagaccgccaacggcaccgccattcctattggcggaggatccgccaatgtgtatgtgaatctggcccctgtggtcaacgtgggccagaacctggtggtggatctgagcacccagatcttttgccacaacgactaccccgagacaatcaccgactacgtgaccctgcagagaggctctgcttacggcggcgtgctgagcaatttttccggcaccgtgaagtacagcggcagcagctacccatttcctaccaccagcgagacacccagagtggtgtacaacagcagaaccgacaagccctggcctgtggctctgtacctgacacctgttagctctgctggcggcgtggccattaaggccggatctctgattgccgtgctgatcctgcggcagaccaacaactacaacagcgacgacttccagttcgtgtggaacatctacgccaacaacgacgtggtggtgcctacaggcggctgtgatgtgtctgccagagatgtgaccgtgacactgcctgactaccctggcagcgtgccaattcctctgaccgtgtactgtgccaagagccagaatctgggctactacctgagcggcacaacagccgatgccggcaacagcatcttcaccaacaccgccagcttcagccctgctcaaggtgttggagtgcagctgacccggaacggcacaatcatccccgccaacaataccgtgtctctgggcgctgttggcaccagcgctgtttctctgggactgaccgccaattacgccagaacaggcggacaagtgaccgccggcaatgtgcagtctatcatcggcgtgaccttcgtgtaccagcctggcgacggaaatgccgacgtgaccatcaccgtgaacggaaaggtggtggccaaggccaagctgaaccgggaagagatcgatggcgtgaagctggaaagcacccggatctaccagatcctggccatctacagcacagtggcctctagcctggtgctggtggtgtccctgggagccatcagcttttggatgtgcagcaacggcagcctgcagtgccggatctgtatctgaggactagtccctgttcccagagcccacttttttttctttttttgaaataaaatagcctgtctttcagatctaaaaaaaaaaaaaaaaaaaaaaaaaaaaaaaaaaaaaaaaaaaaaaaaaaaaaaaaaaaaaaaaaaaaaaaaaaaaaaaaaaaaaaaaaaaaaaaaaaaa

SEQ ID NO: 1062 - RNA, 1703 nt, synthetic construct
  misc_feature 1..1703: note Artificial____HsIgE(1-18)_LumSynth(1-154_C37A_N102D)_Linker (GGS)4-GGG_Ec(J96)-FimH(22-300)_Linker-PGDGN_Ec(J96)-FimG(2 4-37) mRNA opt3
  source 1..1703: mol_type = other RNA
aggagagtcccgcagtcggcgtccagcggctctgcttgttcgtgtgtgtgtcgttgcaggccttattcaagcttaccatggactggacctggatcctgtttctggtggccgctgccacaagagtgcacagccagatctatgagggcaagctgaccgccgagggcctgagatttggaatcgtggccagccggttcaatcacgccctggtggatagactggtggaaggcgccatcgatgccattgtcagacacggcggcagagaagaggacatcaccctcgttagagtgcccggctcttgggagattcctgtggctgctggcgagctggcccggaaagaagatatcgacgccgttatcgccatcggcgtgctgatcagaggcgccacacctcacttcgactatatcgccagcgaggtgtccaaaggcctggccgatctgagcctggaactgagaaagcccatcaccttcggcgtgatcaccgctgacacactggaacaggccattgagagagccggcaccaagcacggcaacaaaggatgggaagccgctctgtccgccatcgagatggccaacctgttcaagagcctgagaggcggctctggtggttctggcggatcaggtggaagtggcggaggatttgcctgcaagaccgccaacggaaccgccattcctatcggaggcggaagcgccaatgtgtatgtgaatctggcccctgtggtcaacgtgggccagaacctggtggtggatctgagcacccagatcttttgccacaacgactaccccgagacaatcaccgactacgtgaccctgcagagaggctctgcttacggcggagtgctgagcaatttcagcggcaccgtgaagtacagcggcagcagctacccatttcctaccaccagcgagacacccagagtggtgtacaacagcagaaccgacaagccctggcctgtggctctgtacctgacacctgttagctctgctggcggcgtggcaatcaaagccggatctctgatcgctgtgctgatcctgcggcagaccaacaactacaacagcgacgacttccagttcgtgtggaacatctacgccaacaacgacgtggtggtgcctacaggcggctgtgatgtgtctgccagagatgtgaccgtgacactgcctgactaccctggcagcgtgccaattcctctgaccgtgtactgtgccaagagccagaatctgggctactacctgagcggcacaacagccgatgccggcaacagcatcttcaccaacaccgccagcttcagccctgctcaaggtgttggagtgcagctgacccggaacggcacaatcatccccgccaacaataccgtgtctctgggcgctgttggcaccagcgctgtttctctgggactgaccgccaattacgccagaacaggcggacaagtgacagccggcaatgtgcagagcatcatcggagtgaccttcgtgtaccagcctggcgacggaaatgccgacgtgaccatcaccgtgaacggaaaggtggtggccaagtgaggactagtccctgttcccagagcccacttttttttctttttttgaaataaaatagcctgtctttcagatctaaaaaaaaaaaaaaaaaaaaaaaaaaaaaaaaaaaaaaaaaaaaaaaaaaaaaaaaaaaaaaaaaaaaaaaaaaaaaaaaaaaaaaaaaaaaaaaaaaaa

SEQ ID NO: 1063 - RNA, 1670 nt, synthetic construct
  misc_feature 1..1670: note Artificial____HsIgE(1-18)_Ec(J96)-FimH(22-300_N28S_N91S_N24 9Q)_Linker-PGDGN_Ec(J96)-FimG(24-37)_Linker-SGG_LumSynth(1- 154_C37A_N102D) mRNA opt3
  source 1..1670: mol_type = other RNA
aggagagtcccgcagtcggcgtccagcggctctgcttgttcgtgtgtgtgtcgttgcaggccttattcaagcttaccatggactggacctggatcctgtttctggtggccgctgccacaagagtgcacagctttgcctgtaaaaccgccagcggcaccgccattcctatcggcggaggatctgccaatgtgtatgtgaatctggcccctgtggtcaacgtgggccagaacctggtggtggatctgagcacccagatcttttgccacaacgactaccccgagacaatcaccgactacgtgaccctgcagagaggctctgcttacggcggagtgctgagcagcttttccggcaccgtgaagtacagcggcagcagctacccatttcctaccaccagcgagacacccagagtggtgtacaacagcagaaccgacaagccctggcctgtggctctgtacctgacacctgttagctctgctggcggcgtggccattaaggccggatctctgattgccgtgctgatcctgcggcagaccaacaactacaacagcgacgacttccagttcgtgtggaacatctacgccaacaacgacgtggtggtgcctacaggcggctgtgatgtgtctgccagagatgtgaccgtgacactgcctgactaccctggcagcgtgccaattcctctgaccgtgtactgtgccaagagccagaatctgggctactacctgagcggcacaacagccgatgccggcaacagcatcttcaccaacaccgccagcttcagccctgctcaaggtgttggagtgcagctgaccagacagggcacaatcatccccgccaacaataccgtgtctctgggcgctgttggcaccagcgctgtttctctgggactgaccgccaactacgccagaacaggcggacaagtgacagccggcaatgtgcagtctatcatcggcgtgaccttcgtgtaccagcctggcgacggaaatgccgacgtgaccatcaccgtgaacggaaaggtggtggccaagtctggcggcatgcagatctatgagggcaagctgaccgccgagggcctgagatttggaatcgtggccagccggttcaatcacgccctggtggatagactggtggaaggcgccatcgatgccattgtcagacacggcggcagagaagaggacatcaccctcgttagagtgcccggctcttgggagattcctgtggctgctggcgaactggcccggaaagaggatatcgacgccgttatcgccatcggggtgctgatcagaggcgccacacctcacttcgactatatcgccagcgaggtgtccaaaggcctggccgatctgagcctggaactgagaaagcccatcaccttcggcgtgatcaccgctgacacactggaacaggccattgagagagccggcaccaagcacggaaacaaaggatgggaagccgctctgtccgccatcgagatggccaacctgttcaagagcctgcggtgaggactagtccctgttcccagagcccacttttttttctttttttgaaataaaatagcctgtctttcagatctaaaaaaaaaaaaaaaaaaaaaaaaaaaaaaaaaaaaaaaaaaaaaaaaaaaaaaaaaaaaaaaaaaaaaaaaaaaaaaaaaaaaaaaaaaaaaaaaaaaa

SEQ ID NO: 1064 - RNA, 1670 nt, synthetic construct
  misc_feature 1..1670: note Artificial____HsIgE(1-18)_Ec(J96)-FimH(22-300_N28S_N91S_N24 9Q_N256D)_Linker-PGDGN_Ec(J96)-FimG(24-37)_Linker-SGG_LumSy nth(1-154_C37A_N102D) mRNA opt3
  source 1..1670: mol_type = other RNA
aggagagtcccgcagtcggcgtccagcggctctgcttgttcgtgtgtgtgtcgttgcaggccttattcaagcttaccatggactggacctggatcctgtttctggtggccgctgccacaagagtgcacagctttgcctgtaaaaccgccagcggcaccgccattcctatcggcggaggatctgccaatgtgtatgtgaatctggcccctgtggtcaacgtgggccagaacctggtggtggatctgagcacccagatcttttgccacaacgactaccccgagacaatcaccgactacgtgaccctgcagagaggctctgcttacggcggagtgctgagcagcttttccggcaccgtgaagtacagcggcagcagctacccatttcctaccaccagcgagacacccagagtggtgtacaacagcagaaccgacaagccctggcctgtggctctgtacctgacacctgttagctctgctggcggcgtggccattaaggccggatctctgattgccgtgctgatcctgcggcagaccaacaactacaacagcgacgacttccagttcgtgtggaacatctacgccaacaacgacgtggtggtgcctacaggcggctgtgatgtgtctgccagagatgtgaccgtgacactgcctgactaccctggcagcgtgccaattcctctgaccgtgtactgtgccaagagccagaatctgggctactacctgagcggcacaacagccgatgccggcaacagcatcttcaccaacaccgccagcttcagccctgctcaaggtgttggagtgcagctgaccagacagggcacaatcatccccgccgacaacacagtgtctctgggagctgttggcaccagcgccgtttctctgggactgacagccaactacgccagaacaggcggacaagtgacagccggcaatgtgcagtctatcatcggcgtgaccttcgtgtaccagcctggcgacggaaatgccgacgtgaccatcaccgtgaacggaaaggtggtggccaagtctggcggcatgcagatctatgagggcaagctgaccgccgagggcctgagatttggaatcgtggccagccggttcaatcacgccctggtggatagactggtggaaggcgccatcgatgccattgtcagacacggcggcagagaagaggacatcaccctcgttagagtgcccggctcttgggagattcctgtggctgctggcgaactggcccggaaagaggatatcgacgccgttatcgccatcggggtgctgatcagaggcgccacacctcacttcgactatatcgccagcgaggtgtccaaaggcctggccgatctgagcctggaactgagaaagcccatcaccttcggcgtgatcaccgctgacacactggaacaggccattgagagagccggcaccaagcacggaaacaaaggatgggaagccgctctgtccgccatcgagatggccaacctgttcaagagcctgcggtgaggactagtccctgttcccagagcccacttttttttctttttttgaaataaaatagcctgtctttcagatctaaaaaaaaaaaaaaaaaaaaaaaaaaaaaaaaaaaaaaaaaaaaaaaaaaaaaaaaaaaaaaaaaaaaaaaaaaaaaaaaaaaaaaaaaaaaaaaaaaaa

SEQ ID NO: 1065 - RNA, 1670 nt, synthetic construct
  misc_feature 1..1670: note Artificial____HsIgE(1-18)_Ec(J96)-FimH(22-300_N28S_V48C_L55 C_N91S_N249Q)_Linker-PGDGN_Ec(J96)-FimG(24-37)_Linker-SGG_L umSynth(1-154_C37A_N102D) mRNA opt3
  source 1..1670: mol_type = other RNA
aggagagtcccgcagtcggcgtccagcggctctgcttgttcgtgtgtgtgtcgttgcaggccttattcaagcttaccatggactggacctggatcctgtttctggtggccgctgccacaagagtgcacagctttgcctgtaaaaccgccagcggcaccgccattcctatcggcggaggatctgccaatgtgtatgtgaatctggccccttgcgtgaacgtgggccagaactgtgtggtggacctgagcacccagatcttttgccacaacgactaccccgagacaatcaccgactacgtgaccctgcagagaggctctgcttacggcggagtgctgagcagcttttccggcaccgtgaagtacagcggcagcagctacccatttcctaccaccagcgagacacccagagtggtgtacaacagcagaaccgacaagccctggcctgtggctctgtacctgacacctgttagctctgctggcggcgtggccattaaggccggatctctgattgccgtgctgatcctgcggcagaccaacaactacaacagcgacgacttccagttcgtgtggaacatctacgccaacaacgacgtggtggtgcctacaggcggctgtgatgtgtctgccagagatgtgaccgtgacactgcctgactaccctggcagcgtgccaattcctctgaccgtgtactgtgccaagagccagaacctgggctactacctgtctggcacaacagccgatgccggcaacagcatcttcaccaacaccgccagcttcagccctgctcaaggtgttggagtgcagctgaccagacagggcacaatcatccccgccaacaataccgtgtctctgggcgctgttggcaccagcgctgtttctctgggactgaccgccaactacgccagaacaggcggacaagtgacagccggcaatgtgcagtctatcatcggcgtgaccttcgtgtaccagcctggcgacggaaatgccgacgtgaccatcaccgtgaacggaaaggtggtggccaagtctggcggcatgcagatctatgagggcaagctgaccgccgagggcctgagatttggaatcgtggccagccggttcaatcacgccctggtggatagactggtggaaggcgccatcgatgccattgtcagacacggcggcagagaagaggacatcaccctcgttagagtgcccggctcttgggagattcctgtggctgctggcgaactggcccggaaagaggatatcgacgccgttatcgccatcggggtgctgatcagaggcgccacacctcacttcgactatatcgccagcgaggtgtccaaaggcctggccgatctgagcctggaactgagaaagcccatcaccttcggcgtgatcaccgctgacacactggaacaggccattgagagagccggcaccaagcacggaaacaaaggatgggaagccgctctgtccgccatcgagatggccaacctgttcaagagcctgcggtgaggactagtccctgttcccagagcccacttttttttctttttttgaaataaaatagcctgtctttcagatctaaaaaaaaaaaaaaaaaaaaaaaaaaaaaaaaaaaaaaaaaaaaaaaaaaaaaaaaaaaaaaaaaaaaaaaaaaaaaaaaaaaaaaaaaaaaaaaaaaaa

SEQ ID NO: 1066 - RNA, 1670 nt, synthetic construct
  misc_feature 1..1670: note Artificial____HsIgE(1-18)_Ec(J96)-FimH(22-300_F165V)_Linker -PGDGN_Ec(J96)-FimG(24-37)_Linker-SGG_LumSynth(1-154_C37A_N 102D) mRNA opt3
  source 1..1670: mol_type = other RNA
aggagagtcccgcagtcggcgtccagcggctctgcttgttcgtgtgtgtgtcgttgcaggccttattcaagcttaccatggactggacctggatcctgtttctggtggccgctgccacaagagtgcacagctttgcctgcaagaccgccaacggcaccgccattcctattggcggaggatccgccaatgtgtatgtgaatctggcccctgtggtcaacgtgggccagaacctggtggtggatctgagcacccagatcttttgccacaacgactaccccgagacaatcaccgactacgtgaccctgcagagaggctctgcttacggcggcgtgctgagcaatttttccggcaccgtgaagtacagcggcagcagctacccatttcctaccaccagcgagacacccagagtggtgtacaacagcagaaccgacaagccctggcctgtggctctgtacctgacacctgttagctctgctggcggcgtggccattaaggccggatctctgattgccgtgctgatcctgcggcagaccaacaactacaacagcgacgacttccaggtcgtgtggaacatctacgccaacaacgacgtggtggtgcctacaggcggctgtgatgtgtctgccagagatgtgaccgtgacactgcctgactaccctggcagcgtgccaattcctctgaccgtgtactgtgccaagagccagaatctgggctactacctgagcggcacaacagccgatgccggcaacagcatcttcaccaacaccgccagcttcagccctgctcaaggtgttggagtgcagctgacccggaacggcacaatcatccccgccaacaataccgtgtctctgggcgctgttggcaccagcgctgtttctctgggactgaccgccaattacgccagaacaggcggacaagtgaccgccggcaatgtgcagtctatcatcggcgtgaccttcgtgtaccagcctggcgacggaaatgccgacgtgaccatcaccgtgaacggaaaggtggtggccaagtctggcggcatgcagatctatgagggcaagctgacagccgagggcctgagatttggaatcgtggccagccggttcaatcacgccctggtggatagactggtggaaggcgccatcgatgccattgtcagacacggcggcagagaagaggacatcaccctcgttagagtgcccggctcttgggagattcctgtggctgctggcgaactggcccggaaagaggatatcgacgccgttatcgccatcggagtgctgatcagaggcgccacacctcacttcgactatatcgccagcgaggtgtccaaaggcctggccgatctgagcctggaactgagaaagcccatcaccttcggcgtgatcaccgctgacacactggaacaggccattgagagagccggcaccaagcacggaaacaaaggatgggaagccgctctgtccgccatcgagatggccaacctgttcaagagcctgcggtgaggactagtccctgttcccagagcccacttttttttctttttttgaaataaaatagcctgtctttcagatctaaaaaaaaaaaaaaaaaaaaaaaaaaaaaaaaaaaaaaaaaaaaaaaaaaaaaaaaaaaaaaaaaaaaaaaaaaaaaaaaaaaaaaaaaaaaaaaaaaaa

SEQ ID NO: 1067 - RNA, 1697 nt, synthetic construct
  misc_feature 1..1697: note Artificial____HsIgE(1-18)_Ec(J96)-FimH(22-300_N28S_N91S_N24 9Q)_Linker-PGDGN_Ec(J96)-FimG(24-37)_Linker-SGG_Ferritin(5- 167_N19Q) mRNA opt3
  source 1..1697: mol_type = other RNA
aggagagtcccgcagtcggcgtccagcggctctgcttgttcgtgtgtgtgtcgttgcaggccttattcaagcttaccatggactggacctggatcctgtttctggtggccgctgccacaagagtgcacagctttgcctgtaaaaccgccagcggcaccgccattcctatcggcggaggatctgccaatgtgtatgtgaatctggcccctgtggtcaacgtgggccagaacctggtggtggatctgagcacccagatcttttgccacaacgactaccccgagacaatcaccgactacgtgaccctgcagagaggctctgcttacggcggagtgctgagcagcttttccggcaccgtgaagtacagcggcagcagctacccatttcctaccaccagcgagacacccagagtggtgtacaacagcagaaccgacaagccctggcctgtggctctgtacctgacacctgttagctctgctggcggcgtggccattaaggccggatctctgattgccgtgctgatcctgcggcagaccaacaactacaacagcgacgacttccagttcgtgtggaacatctacgccaacaacgacgtggtggtgcctacaggcggctgtgatgtgtctgccagagatgtgaccgtgacactgcctgactaccctggcagcgtgccaattcctctgaccgtgtactgtgccaagagccagaatctgggctactacctgagcggcacaacagccgatgccggcaacagcatcttcaccaacaccgccagcttcagccctgctcaaggtgttggagtgcagctgaccagacagggcacaatcatccccgccaacaataccgtgtctctgggcgctgttggcaccagcgctgtttctctgggactgaccgccaactacgccagaacaggcggacaagtgacagccggcaatgtgcagtctatcatcggcgtgaccttcgtgtaccagcctggcgacggaaatgccgacgtgaccatcaccgtgaacggaaaggtggtggccaagtctggcggcgacatcatcaagctgctgaacgagcaagtgaacaaagagatgcagagcagcaacctgtacatgagcatgagcagctggtgctacacccacagccttgatggcgccggactgttcctgtttgatcacgccgccgaggaatacgagcacgccaagaagctgatcatcttcctgaacgagaacaacgtgcccgtccagctgacctctatctctgcccctgagcacaagttcgagggcctgacacagatcttccagaaggcctacgaacacgagcagcacatcagcgagagcatcaacaacatcgtggaccacgccattaagagcaaggatcacgccaccttcaactttctgcagtggtacgtggccgaacagcacgaggaagaggtgctgttcaaggacatcctggacaagatcgagctgatcggcaacgagaaccacggcctgtatctggccgaccagtacgtgaagggaatcgccaagtccagaaagagctgaggactagtccctgttcccagagcccacttttttttctttttttgaaataaaatagcctgtctttcagatctaaaaaaaaaaaaaaaaaaaaaaaaaaaaaaaaaaaaaaaaaaaaaaaaaaaaaaaaaaaaaaaaaaaaaaaaaaaaaaaaaaaaaaaaaaaaaaaaaaaa

SEQ ID NO: 1068 - RNA, 1697 nt, synthetic construct
  misc_feature 1..1697: note Artificial____HsIgE(1-18)_Ec(J96)-FimH(22-300_N28S_N91S_N24 9Q_N256D)_Linker-PGDGN_Ec(J96)-FimG(24-37)_Linker-SGG_Ferri tin(5-167_N19Q) mRNA opt3
  source 1..1697: mol_type = other RNA
aggagagtcccgcagtcggcgtccagcggctctgcttgttcgtgtgtgtgtcgttgcaggccttattcaagcttaccatggactggacctggatcctgtttctggtggccgctgccacaagagtgcacagctttgcctgtaaaaccgccagcggcaccgccattcctatcggcggaggatctgccaatgtgtatgtgaatctggcccctgtggtcaacgtgggccagaacctggtggtggatctgagcacccagatcttttgccacaacgactaccccgagacaatcaccgactacgtgaccctgcagagaggctctgcttacggcggagtgctgagcagcttttccggcaccgtgaagtacagcggcagcagctacccatttcctaccaccagcgagacacccagagtggtgtacaacagcagaaccgacaagccctggcctgtggctctgtacctgacacctgttagctctgctggcggcgtggccattaaggccggatctctgattgccgtgctgatcctgcggcagaccaacaactacaacagcgacgacttccagttcgtgtggaacatctacgccaacaacgacgtggtggtgcctacaggcggctgtgatgtgtctgccagagatgtgaccgtgacactgcctgactaccctggcagcgtgccaattcctctgaccgtgtactgtgccaagagccagaatctgggctactacctgagcggcacaacagccgatgccggcaacagcatcttcaccaacaccgccagcttcagccctgctcaaggtgttggagtgcagctgaccagacagggcacaatcatccccgccgacaacacagtgtctctgggagctgttggcaccagcgccgtttctctgggactgacagccaactacgccagaacaggcggacaagtgacagccggcaatgtgcagtctatcatcggcgtgaccttcgtgtaccagcctggcgacggaaatgccgacgtgaccatcaccgtgaacggaaaggtggtggccaagtctggcggcgacatcatcaagctgctgaacgagcaagtgaacaaagagatgcagagcagcaacctgtacatgagcatgagcagctggtgctacacccacagccttgatggcgccggactgttcctgtttgatcacgccgccgaggaatacgagcacgccaagaagctgatcatcttcctgaacgagaacaacgtgcccgtccagctgacctctatctctgcccctgagcacaagttcgagggcctgacacagatcttccagaaggcctacgaacacgagcagcacatcagcgagagcatcaacaacatcgtggaccacgccattaagagcaaggatcacgccaccttcaactttctgcagtggtacgtggccgaacagcacgaggaagaggtgctgttcaaggacatcctggacaagatcgagctgatcggcaacgagaaccacggcctgtatctggccgaccagtacgtgaagggaatcgccaagtccagaaagagctgaggactagtccctgttcccagagcccacttttttttctttttttgaaataaaatagcctgtctttcagatctaaaaaaaaaaaaaaaaaaaaaaaaaaaaaaaaaaaaaaaaaaaaaaaaaaaaaaaaaaaaaaaaaaaaaaaaaaaaaaaaaaaaaaaaaaaaaaaaaaaa

SEQ ID NO: 1069 - RNA, 1697 nt, synthetic construct
  misc_feature 1..1697: note Artificial____HsIgE(1-18)_Ec(J96)-FimH(22-300_N28S_V48C_L55 C_N91S_N249Q)_Linker-PGDGN_Ec(J96)-FimG(24-37)_Linker-SGG_F erritin(5-167_N19Q) mRNA opt3
  source 1..1697: mol_type = other RNA
aggagagtcccgcagtcggcgtccagcggctctgcttgttcgtgtgtgtgtcgttgcaggccttattcaagcttaccatggactggacctggatcctgtttctggtggccgctgccacaagagtgcacagctttgcctgtaaaaccgccagcggcaccgccattcctatcggcggaggatctgccaatgtgtatgtgaatctggccccttgcgtgaacgtgggccagaactgtgtggtggacctgagcacccagatcttttgccacaacgactaccccgagacaatcaccgactacgtgaccctgcagagaggctctgcttacggcggagtgctgagcagcttttccggcaccgtgaagtacagcggcagcagctacccatttcctaccaccagcgagacacccagagtggtgtacaacagcagaaccgacaagccctggcctgtggctctgtacctgacacctgttagctctgctggcggcgtggccattaaggccggatctctgattgccgtgctgatcctgcggcagaccaacaactacaacagcgacgacttccagttcgtgtggaacatctacgccaacaacgacgtggtggtgcctacaggcggctgtgatgtgtctgccagagatgtgaccgtgacactgcctgactaccctggcagcgtgccaattcctctgaccgtgtactgtgccaagagccagaacctgggctactacctgtctggcacaacagccgatgccggcaacagcatcttcaccaacaccgccagcttcagccctgctcaaggtgttggagtgcagctgaccagacagggcacaatcatccccgccaacaataccgtgtctctgggcgctgttggcaccagcgctgtttctctgggactgaccgccaactacgccagaacaggcggacaagtgacagccggcaatgtgcagtctatcatcggcgtgaccttcgtgtaccagcctggcgacggaaatgccgacgtgaccatcaccgtgaacggaaaggtggtggccaagtctggcggcgacatcatcaagctgctgaacgagcaagtgaacaaagagatgcagagcagcaacctgtacatgagcatgagcagctggtgctacacccacagccttgatggcgccggactgttcctgtttgatcacgccgccgaggaatacgagcacgccaagaagctgatcatcttcctgaacgagaacaacgtgcccgtccagctgacctctatctctgcccctgagcacaagttcgagggcctgacacagatcttccagaaggcctacgaacacgagcagcacatcagcgagagcatcaacaacatcgtggaccacgccattaagagcaaggatcacgccaccttcaactttctgcagtggtacgtggccgaacagcacgaggaagaggtgctgttcaaggacatcctggacaagatcgagctgatcggcaacgagaaccacggcctgtatctggccgaccagtacgtgaagggaatcgccaagtccagaaagagctgaggactagtccctgttcccagagcccacttttttttctttttttgaaataaaatagcctgtctttcagatctaaaaaaaaaaaaaaaaaaaaaaaaaaaaaaaaaaaaaaaaaaaaaaaaaaaaaaaaaaaaaaaaaaaaaaaaaaaaaaaaaaaaaaaaaaaaaaaaaaaa

SEQ ID NO: 1070 - RNA, 1697 nt, synthetic construct
  misc_feature 1..1697: note Artificial____HsIgE(1-18)_Ec(J96)-FimH(22-300_F165V)_Linker -PGDGN_Ec(J96)-FimG(24-37)_Linker-SGG_Ferritin(5-167_N19Q) mRNA opt3
  source 1..1697: mol_type = other RNA
aggagagtcccgcagtcggcgtccagcggctctgcttgttcgtgtgtgtgtcgttgcaggccttattcaagcttaccatggactggacctggatcctgtttctggtggccgctgccacaagagtgcacagctttgcctgcaagaccgccaacggcaccgccattcctattggcggaggatccgccaatgtgtatgtgaatctggcccctgtggtcaacgtgggccagaacctggtggtggatctgagcacccagatcttttgccacaacgactaccccgagacaatcaccgactacgtgaccctgcagagaggctctgcttacggcggcgtgctgagcaatttttccggcaccgtgaagtacagcggcagcagctacccatttcctaccaccagcgagacacccagagtggtgtacaacagcagaaccgacaagccctggcctgtggctctgtacctgacacctgttagctctgctggcggcgtggccattaaggccggatctctgattgccgtgctgatcctgcggcagaccaacaactacaacagcgacgacttccaggtcgtgtggaacatctacgccaacaacgacgtggtggtgcctacaggcggctgtgatgtgtctgccagagatgtgaccgtgacactgcctgactaccctggcagcgtgccaattcctctgaccgtgtactgtgccaagagccagaatctgggctactacctgagcggcacaacagccgatgccggcaacagcatcttcaccaacaccgccagcttcagccctgctcaaggtgttggagtgcagctgacccggaacggcacaatcatccccgccaacaataccgtgtctctgggcgctgttggcaccagcgctgtttctctgggactgaccgccaattacgccagaacaggcggacaagtgaccgccggcaatgtgcagtctatcatcggcgtgaccttcgtgtaccagcctggcgacggaaatgccgacgtgaccatcaccgtgaacggaaaggtggtggccaagtctggcggcgacatcatcaagctgctgaacgagcaagtgaacaaagagatgcagagcagcaacctgtacatgagcatgagcagctggtgctacacccacagccttgatggcgccggactgttcctgtttgaccatgccgccgaggaatacgagcacgccaagaagctgatcatcttcctgaacgagaacaacgtgcccgtccagctgaccagcatttctgcccctgagcacaagttcgagggcctgacacagatcttccagaaggcctacgaacacgagcagcacatcagcgagagcatcaacaacatcgtggaccacgccattaagagcaaggatcacgccaccttcaactttctgcagtggtacgtggccgaacagcacgaggaagaggtgctgttcaaggacatcctggacaagatcgagctgatcggcaacgagaaccacggcctgtatctggccgaccagtacgtgaagggaatcgccaagtccagaaagagctgaggactagtccctgttcccagagcccacttttttttctttttttgaaataaaatagcctgtctttcagatctaaaaaaaaaaaaaaaaaaaaaaaaaaaaaaaaaaaaaaaaaaaaaaaaaaaaaaaaaaaaaaaaaaaaaaaaaaaaaaaaaaaaaaaaaaaaaaaaaaaa

SEQ ID NO: 1071 - RNA, 974 nt, synthetic construct
  misc_feature 1..974: note Artificial____Ec(J96)-FimC(1-36)_Ec(J96)-FimC(37-241) mRNA opt4
  source 1..974: mol_type = other RNA
aggagagtcccgcagtcggcgtccagcggctctgcttgttcgtgtgtgtgtcgttgcaggccttattcaagcttaccatgagcaacaagaacgtgaacgtgagaaagagccaggagatcaccttctgcctgctggccggcatcctgatgttcatggccatgatggtggccggcagagccgaggccggcgtggccctgggcgccaccagagtgatctaccccgccggccagaagcaggtgcagctggccgtgaccaacaacgacgagaacagcacctacctgatccagagctgggtggagaacgccgacggcgtgaaggacggcagattcatcgtgaccccccccctgttcgccatgaagggcaagaaggagaacaccctgagaatcctggacgccaccaacaaccagctgccccaggacagagagagcctgttctggatgaacgtgaaggccatccccagcatggacaagagcaagctgaccgagaacaccctgcagctggccatcatcagcagaatcaagctgtactacagacccgccaagctggccctgccccccgaccaggccgccgagaagctgagattcagaagaagcgccaacagcctgaccctgatcaaccccaccccctactacctgaccgtgaccgagctgaacgccggcaccagagtgctggagaacgccctggtgccccccatgggcgagagcaccgtgaagctgcccagcgacgccggcagcaacatcacctacagaaccatcaacgactacggcgccctgacccccaagatgaccggcgtgatggagtgaggactagtccctgttcccagagcccacttttttttctttttttgaaataaaatagcctgtctttcagatctaaaaaaaaaaaaaaaaaaaaaaaaaaaaaaaaaaaaaaaaaaaaaaaaaaaaaaaaaaaaaaaaaaaaaaaaaaaaaaaaaaaaaaaaaaaaaaaaaaaa

SEQ ID NO: 1072 - RNA, 920 nt, synthetic construct
  misc_feature 1..920: note = Artificial____HsIgE(1-18)_Ec(J96)-FimC(37-241) mRNA opt4
  source 1..920: mol_type = other RNA
aggagagtcccgcagtcggcgtccagcggctctgcttgttcgtgtgtgtgtcgttgcaggccttattcaagcttaccatggactggacctggatcctgttcctggtggccgccgccaccagagtgcacagcggcgtggccctgggcgccaccagagtgatctaccccgccggccagaagcaggtgcagctggccgtgaccaacaacgacgagaacagcacctacctgatccagagctgggtggagaacgccgacggcgtgaaggacggcagattcatcgtgaccccccccctgttcgccatgaagggcaagaaggagaacaccctgagaatcctggacgccaccaacaaccagctgccccaggacagagagagcctgttctggatgaacgtgaaggccatccccagcatggacaagagcaagctgaccgagaacaccctgcagctggccatcatcagcagaatcaagctgtactacagacccgccaagctggccctgccccccgaccaggccgccgagaagctgagattcagaagaagcgccaacagcctgaccctgatcaaccccaccccctactacctgaccgtgaccgagctgaacgccggcaccagagtgctggagaacgccctggtgccccccatgggcgagagcaccgtgaagctgcccagcgacgccggcagcaacatcacctacagaaccatcaacgactacggcgccctgacccccaagatgaccggcgtgatggagtgaggactagtccctgttcccagagcccacttttttttctttttttgaaataaaatagcctgtctttcagatctaaaaaaaaaaaaaaaaaaaaaaaaaaaaaaaaaaaaaaaaaaaaaaaaaaaaaaaaaaaaaaaaaaaaaaaaaaaaaaaaaaaaaaaaaaaaaaaaaaaa

SEQ ID NO: 1073 - RNA, 1151 nt, synthetic construct
  misc_feature 1..1151: note Artificial____Ec(J96)-FimH(1-21)_Ec(J96)-FimH(22-300) mRNA opt4
  source 1..1151: mol_type = other RNA
aggagagtcccgcagtcggcgtccagcggctctgcttgttcgtgtgtgtgtcgttgcaggccttattcaagcttaccatgaagagagtgatcaccctgttcgccgtgctgctgatgggctggagcgtgaacgcctggagcttcgcctgcaagaccgccaacggcaccgccatccccatcggcggcggcagcgccaacgtgtacgtgaacctggcccccgtggtgaacgtgggccagaacctggtggtggacctgagcacccagatcttctgccacaacgactaccccgagaccatcaccgactacgtgaccctgcagagaggcagcgcctacggcggcgtgctgagcaacttcagcggcaccgtgaagtacagcggcagcagctaccccttccccaccaccagcgagacccccagagtggtgtacaacagcagaaccgacaagccctggcccgtggccctgtacctgacccccgtgagcagcgccggcggcgtggccatcaaggccggcagcctgatcgccgtgctgatcctgagacagaccaacaactacaacagcgacgacttccagttcgtgtggaacatctacgccaacaacgacgtggtggtgcccaccggcggctgcgacgtgagcgccagagacgtgaccgtgaccctgcccgactaccccggcagcgtgcccatccccctgaccgtgtactgcgccaagagccagaacctgggctactacctgagcggcaccaccgccgacgccggcaacagcatcttcaccaacaccgccagcttcagccccgcccagggcgtgggcgtgcagctgaccagaaacggcaccatcatccccgccaacaacaccgtgagcctgggcgccgtgggcaccagcgccgtgagcctgggcctgaccgccaactacgccagaaccggcggccaggtgaccgccggcaacgtgcagagcatcatcggcgtgaccttcgtgtaccagtgaggactagtccctgttcccagagcccacttttttttctttttttgaaataaaatagcctgtctttcagatctaaaaaaaaaaaaaaaaaaaaaaaaaaaaaaaaaaaaaaaaaaaaaaaaaaaaaaaaaaaaaaaaaaaaaaaaaaaaaaaaaaaaaaaaaaaaaaaaaaaa

SEQ ID NO: 1074 - RNA, 1142 nt, synthetic construct
  misc_feature 1..1142: note = Artificial____HsIgE(1-18)_Ec(J96)-FimH(22-300) mRNA opt4
  source 1..1142: mol_type = other RNA
aggagagtcccgcagtcggcgtccagcggctctgcttgttcgtgtgtgtgtcgttgcaggccttattcaagcttaccatggactggacctggatcctgttcctggtggccgccgccaccagagtgcacagcttcgcctgcaagaccgccaacggcaccgccatccccatcggcggcggcagcgccaacgtgtacgtgaacctggcccccgtggtgaacgtgggccagaacctggtggtggacctgagcacccagatcttctgccacaacgactaccccgagaccatcaccgactacgtgaccctgcagagaggcagcgcctacggcggcgtgctgagcaacttcagcggcaccgtgaagtacagcggcagcagctaccccttccccaccaccagcgagacccccagagtggtgtacaacagcagaaccgacaagccctggcccgtggccctgtacctgacccccgtgagcagcgccggcggcgtggccatcaaggccggcagcctgatcgccgtgctgatcctgagacagaccaacaactacaacagcgacgacttccagttcgtgtggaacatctacgccaacaacgacgtggtggtgcccaccggcggctgcgacgtgagcgccagagacgtgaccgtgaccctgcccgactaccccggcagcgtgcccatccccctgaccgtgtactgcgccaagagccagaacctgggctactacctgagcggcaccaccgccgacgccggcaacagcatcttcaccaacaccgccagcttcagccccgcccagggcgtgggcgtgcagctgaccagaaacggcaccatcatccccgccaacaacaccgtgagcctgggcgccgtgggcaccagcgccgtgagcctgggcctgaccgccaactacgccagaaccggcggccaggtgaccgccggcaacgtgcagagcatcatcggcgtgaccttcgtgtaccagtgaggactagtccctgttcccagagcccacttttttttctttttttgaaataaaatagcctgtctttcagatctaaaaaaaaaaaaaaaaaaaaaaaaaaaaaaaaaaaaaaaaaaaaaaaaaaaaaaaaaaaaaaaaaaaaaaaaaaaaaaaaaaaaaaaaaaaaaaaaaaaa

SEQ ID NO: 1075 - RNA, 1148 nt, synthetic construct
  misc_feature 1..1148: note = Artificial____MmIgK(1-20)_Ec(J96)-FimH(22-300) mRNA opt4
  source 1..1148: mol_type = other RNA
aggagagtcccgcagtcggcgtccagcggctctgcttgttcgtgtgtgtgtcgttgcaggccttattcaagcttaccatggagaccgacaccctgctgctgtgggtgctgctgctgtgggtgcccggcagcaccggcttcgcctgcaagaccgccaacggcaccgccatccccatcggcggcggcagcgccaacgtgtacgtgaacctggcccccgtggtgaacgtgggccagaacctggtggtggacctgagcacccagatcttctgccacaacgactaccccgagaccatcaccgactacgtgaccctgcagagaggcagcgcctacggcggcgtgctgagcaacttcagcggcaccgtgaagtacagcggcagcagctaccccttccccaccaccagcgagacccccagagtggtgtacaacagcagaaccgacaagccctggcccgtggccctgtacctgacccccgtgagcagcgccggcggcgtggccatcaaggccggcagcctgatcgccgtgctgatcctgagacagaccaacaactacaacagcgacgacttccagttcgtgtggaacatctacgccaacaacgacgtggtggtgcccaccggcggctgcgacgtgagcgccagagacgtgaccgtgaccctgcccgactaccccggcagcgtgcccatccccctgaccgtgtactgcgccaagagccagaacctgggctactacctgagcggcaccaccgccgacgccggcaacagcatcttcaccaacaccgccagcttcagccccgcccagggcgtgggcgtgcagctgaccagaaacggcaccatcatccccgccaacaacaccgtgagcctgggcgccgtgggcaccagcgccgtgagcctgggcctgaccgccaactacgccagaaccggcggccaggtgaccgccggcaacgtgcagagcatcatcggcgtgaccttcgtgtaccagtgaggactagtccctgttcccagagcccacttttttttctttttttgaaataaaatagcctgtctttcagatctaaaaaaaaaaaaaaaaaaaaaaaaaaaaaaaaaaaaaaaaaaaaaaaaaaaaaaaaaaaaaaaaaaaaaaaaaaaaaaaaaaaaaaaaaaaaaaaaaaaa

SEQ ID NO: 1076 - RNA, 1208 nt, synthetic construct
  misc_feature 1..1208: note Artificial____Ec(J96)-FimH(1-21)_Ec(J96)-FimH(22-300)_Linke r-PGDGN_Ec(J96)-FimG(24-37) mRNA opt4
  source 1..1208: mol_type = other RNA
aggagagtcccgcagtcggcgtccagcggctctgcttgttcgtgtgtgtgtcgttgcaggccttattcaagcttaccatgaagagagtgatcaccctgttcgccgtgctgctgatgggctggagcgtgaacgcctggagcttcgcctgcaagaccgccaacggcaccgccatccccatcggcggcggcagcgccaacgtgtacgtgaacctggcccccgtggtgaacgtgggccagaacctggtggtggacctgagcacccagatcttctgccacaacgactaccccgagaccatcaccgactacgtgaccctgcagagaggcagcgcctacggcggcgtgctgagcaacttcagcggcaccgtgaagtacagcggcagcagctaccccttccccaccaccagcgagacccccagagtggtgtacaacagcagaaccgacaagccctggcccgtggccctgtacctgacccccgtgagcagcgccggcggcgtggccatcaaggccggcagcctgatcgccgtgctgatcctgagacagaccaacaactacaacagcgacgacttccagttcgtgtggaacatctacgccaacaacgacgtggtggtgcccaccggcggctgcgacgtgagcgccagagacgtgaccgtgaccctgcccgactaccccggcagcgtgcccatccccctgaccgtgtactgcgccaagagccagaacctgggctactacctgagcggcaccaccgccgacgccggcaacagcatcttcaccaacaccgccagcttcagccccgcccagggcgtgggcgtgcagctgaccagaaacggcaccatcatccccgccaacaacaccgtgagcctgggcgccgtgggcaccagcgccgtgagcctgggcctgaccgccaactacgccagaaccggcggccaggtgaccgccggcaacgtgcagagcatcatcggcgtgaccttcgtgtaccagcccggcgacggcaacgccgacgtgaccatcaccgtgaacggcaaggtggtggccaagtgaggactagtccctgttcccagagcccacttttttttctttttttgaaataaaatagcctgtctttcagatctaaaaaaaaaaaaaaaaaaaaaaaaaaaaaaaaaaaaaaaaaaaaaaaaaaaaaaaaaaaaaaaaaaaaaaaaaaaaaaaaaaaaaaaaaaaaaaaaaaaa

SEQ ID NO: 1077 - RNA, 1199 nt, synthetic construct
  misc_feature 1..1199: note Artificial____HsIgE(1-18)_Ec(J96)-FimH(22-300)_Linker-PGDGN _Ec(J96)-FimG(24-37) mRNA opt4
  source 1..1199: mol_type = other RNA
aggagagtcccgcagtcggcgtccagcggctctgcttgttcgtgtgtgtgtcgttgcaggccttattcaagcttaccatggactggacctggatcctgttcctggtggccgccgccaccagagtgcacagcttcgcctgcaagaccgccaacggcaccgccatccccatcggcggcggcagcgccaacgtgtacgtgaacctggcccccgtggtgaacgtgggccagaacctggtggtggacctgagcacccagatcttctgccacaacgactaccccgagaccatcaccgactacgtgaccctgcagagaggcagcgcctacggcggcgtgctgagcaacttcagcggcaccgtgaagtacagcggcagcagctaccccttccccaccaccagcgagacccccagagtggtgtacaacagcagaaccgacaagccctggcccgtggccctgtacctgacccccgtgagcagcgccggcggcgtggccatcaaggccggcagcctgatcgccgtgctgatcctgagacagaccaacaactacaacagcgacgacttccagttcgtgtggaacatctacgccaacaacgacgtggtggtgcccaccggcggctgcgacgtgagcgccagagacgtgaccgtgaccctgcccgactaccccggcagcgtgcccatccccctgaccgtgtactgcgccaagagccagaacctgggctactacctgagcggcaccaccgccgacgccggcaacagcatcttcaccaacaccgccagcttcagccccgcccagggcgtgggcgtgcagctgaccagaaacggcaccatcatccccgccaacaacaccgtgagcctgggcgccgtgggcaccagcgccgtgagcctgggcctgaccgccaactacgccagaaccggcggccaggtgaccgccggcaacgtgcagagcatcatcggcgtgaccttcgtgtaccagcccggcgacggcaacgccgacgtgaccatcaccgtgaacggcaaggtggtggccaagtgaggactagtccctgttcccagagcccacttttttttctttttttgaaataaaatagcctgtctttcagatctaaaaaaaaaaaaaaaaaaaaaaaaaaaaaaaaaaaaaaaaaaaaaaaaaaaaaaaaaaaaaaaaaaaaaaaaaaaaaaaaaaaaaaaaaaaaaaaaaaaa

SEQ ID NO: 1078 - RNA, 1205 nt, synthetic construct
  misc_feature 1..1205: note Artificial____HsIgE(1-18)_Ec(J96)-FimH(22-300)_Linker-G4SGG _Ec(J96)-FimG(24-37) mRNA opt4
  source 1..1205: mol_type = other RNA
aggagagtcccgcagtcggcgtccagcggctctgcttgttcgtgtgtgtgtcgttgcaggccttattcaagcttaccatggactggacctggatcctgttcctggtggccgccgccaccagagtgcacagcttcgcctgcaagaccgccaacggcaccgccatccccatcggcggcggcagcgccaacgtgtacgtgaacctggcccccgtggtgaacgtgggccagaacctggtggtggacctgagcacccagatcttctgccacaacgactaccccgagaccatcaccgactacgtgaccctgcagagaggcagcgcctacggcggcgtgctgagcaacttcagcggcaccgtgaagtacagcggcagcagctaccccttccccaccaccagcgagacccccagagtggtgtacaacagcagaaccgacaagccctggcccgtggccctgtacctgacccccgtgagcagcgccggcggcgtggccatcaaggccggcagcctgatcgccgtgctgatcctgagacagaccaacaactacaacagcgacgacttccagttcgtgtggaacatctacgccaacaacgacgtggtggtgcccaccggcggctgcgacgtgagcgccagagacgtgaccgtgaccctgcccgactaccccggcagcgtgcccatccccctgaccgtgtactgcgccaagagccagaacctgggctactacctgagcggcaccaccgccgacgccggcaacagcatcttcaccaacaccgccagcttcagccccgcccagggcgtgggcgtgcagctgaccagaaacggcaccatcatccccgccaacaacaccgtgagcctgggcgccgtgggcaccagcgccgtgagcctgggcctgaccgccaactacgccagaaccggcggccaggtgaccgccggcaacgtgcagagcatcatcggcgtgaccttcgtgtaccagggcggcggcggcagcggcggcgccgacgtgaccatcaccgtgaacggcaaggtggtggccaagtgaggactagtccctgttcccagagcccacttttttttctttttttgaaataaaatagcctgtctttcagatctaaaaaaaaaaaaaaaaaaaaaaaaaaaaaaaaaaaaaaaaaaaaaaaaaaaaaaaaaaaaaaaaaaaaaaaaaaaaaaaaaaaaaaaaaaaaaaaaaaaa

SEQ ID NO: 1079 - RNA, 1205 nt, synthetic construct
  misc_feature 1..1205: note Artificial____MmIgK(1-20)_Ec(J96)-FimH(22-300)_Linker-PGDGN _Ec(J96)-FimG(24-37) mRNA opt4
  source 1..1205: mol_type = other RNA
aggagagtcccgcagtcggcgtccagcggctctgcttgttcgtgtgtgtgtcgttgcaggccttattcaagcttaccatggagaccgacaccctgctgctgtgggtgctgctgctgtgggtgcccggcagcaccggcttcgcctgcaagaccgccaacggcaccgccatccccatcggcggcggcagcgccaacgtgtacgtgaacctggcccccgtggtgaacgtgggccagaacctggtggtggacctgagcacccagatcttctgccacaacgactaccccgagaccatcaccgactacgtgaccctgcagagaggcagcgcctacggcggcgtgctgagcaacttcagcggcaccgtgaagtacagcggcagcagctaccccttccccaccaccagcgagacccccagagtggtgtacaacagcagaaccgacaagccctggcccgtggccctgtacctgacccccgtgagcagcgccggcggcgtggccatcaaggccggcagcctgatcgccgtgctgatcctgagacagaccaacaactacaacagcgacgacttccagttcgtgtggaacatctacgccaacaacgacgtggtggtgcccaccggcggctgcgacgtgagcgccagagacgtgaccgtgaccctgcccgactaccccggcagcgtgcccatccccctgaccgtgtactgcgccaagagccagaacctgggctactacctgagcggcaccaccgccgacgccggcaacagcatcttcaccaacaccgccagcttcagccccgcccagggcgtgggcgtgcagctgaccagaaacggcaccatcatccccgccaacaacaccgtgagcctgggcgccgtgggcaccagcgccgtgagcctgggcctgaccgccaactacgccagaaccggcggccaggtgaccgccggcaacgtgcagagcatcatcggcgtgaccttcgtgtaccagcccggcgacggcaacgccgacgtgaccatcaccgtgaacggcaaggtggtggccaagtgaggactagtccctgttcccagagcccacttttttttctttttttgaaataaaatagcctgtctttcagatctaaaaaaaaaaaaaaaaaaaaaaaaaaaaaaaaaaaaaaaaaaaaaaaaaaaaaaaaaaaaaaaaaaaaaaaaaaaaaaaaaaaaaaaaaaaaaaaaaaaa

SEQ ID NO: 1080 - RNA, 1205 nt, synthetic construct
  misc_feature 1..1205: note Artificial____MmIgK(1-20)_Ec(536)-FimH(22-300)_Linker-PGDGN _Ec(J96)-FimG(24-37) mRNA opt4
  source 1..1205: mol_type = other RNA
aggagagtcccgcagtcggcgtccagcggctctgcttgttcgtgtgtgtgtcgttgcaggccttattcaagcttaccatggagaccgacaccctgctgctgtgggtgctgctgctgtgggtgcccggcagcaccggcttcgcctgcaagaccgccaacggcaccgccatccccatcggcggcggcagcgccaacgtgtacgtgaacctggcccccgccgtgaacgtgggccagaacctggtggtggacctgagcacccagatcttctgccacaacgactaccccgagaccatcaccgactacgtgaccctgcagagaggcagcgcctacggcggcgtgctgagcagcttcagcggcaccgtgaagtacaacggcagcagctaccccttccccaccaccagcgagacccccagagtggtgtacaacagcagaaccgacaagccctggcccgtggccctgtacctgacccccgtgagcagcgccggcggcgtggccatcaaggccggcagcctgatcgccgtgctgatcctgagacagaccaacaactacaacagcgacgacttccagttcgtgtggaacatctacgccaacaacgacgtggtggtgcccaccggcggctgcgacgtgagcgccagagacgtgaccgtgaccctgcccgactaccccggcagcgtgcccatccccctgaccgtgtactgcgccaagagccagaacctgggctactacctgagcggcaccaccgccgacgccggcaacagcatcttcaccaacaccgccagcttcagccccgcccagggcgtgggcgtgcagctgaccagaaacggcaccatcatccccgccaacaacaccgtgagcctgggcgccgtgggcaccagcgccgtgagcctgggcctgaccgccaactacgccagaaccggcggccaggtgaccgccggcaacgtgcagagcatcatcggcgtgaccttcgtgtaccagcccggcgacggcaacgccgacgtgaccatcaccgtgaacggcaaggtggtggccaagtgaggactagtccctgttcccagagcccacttttttttctttttttgaaataaaatagcctgtctttcagatctaaaaaaaaaaaaaaaaaaaaaaaaaaaaaaaaaaaaaaaaaaaaaaaaaaaaaaaaaaaaaaaaaaaaaaaaaaaaaaaaaaaaaaaaaaaaaaaaaaaa

SEQ ID NO: 1081 - RNA, 1229 nt, synthetic construct
  misc_feature 1..1229: note Artificial____HsIgE(1-18)_Ec(J96)-FimH(22-300)_Linker-(G4S) 3_Ec(J96)-FimC(135-148) mRNA opt4
  source 1..1229: mol_type = other RNA
aggagagtcccgcagtcggcgtccagcggctctgcttgttcgtgtgtgtgtcgttgcaggccttattcaagcttaccatggactggacctggatcctgttcctggtggccgccgccaccagagtgcacagcttcgcctgcaagaccgccaacggcaccgccatccccatcggcggcggcagcgccaacgtgtacgtgaacctggcccccgtggtgaacgtgggccagaacctggtggtggacctgagcacccagatcttctgccacaacgactaccccgagaccatcaccgactacgtgaccctgcagagaggcagcgcctacggcggcgtgctgagcaacttcagcggcaccgtgaagtacagcggcagcagctaccccttccccaccaccagcgagacccccagagtggtgtacaacagcagaaccgacaagccctggcccgtggccctgtacctgacccccgtgagcagcgccggcggcgtggccatcaaggccggcagcctgatcgccgtgctgatcctgagacagaccaacaactacaacagcgacgacttccagttcgtgtggaacatctacgccaacaacgacgtggtggtgcccaccggcggctgcgacgtgagcgccagagacgtgaccgtgaccctgcccgactaccccggcagcgtgcccatccccctgaccgtgtactgcgccaagagccagaacctgggctactacctgagcggcaccaccgccgacgccggcaacagcatcttcaccaacaccgccagcttcagccccgcccagggcgtgggcgtgcagctgaccagaaacggcaccatcatccccgccaacaacaccgtgagcctgggcgccgtgggcaccagcgccgtgagcctgggcctgaccgccaactacgccagaaccggcggccaggtgaccgccggcaacgtgcagagcatcatcggcgtgaccttcgtgtaccagggcggcggcggcagcggcggcggcggcagcggcggcggcggcagcaccgagaacaccctgcagctggccatcatcagcagaatcaagtgaggactagtccctgttcccagagcccacttttttttctttttttgaaataaaatagcctgtctttcagatctaaaaaaaaaaaaaaaaaaaaaaaaaaaaaaaaaaaaaaaaaaaaaaaaaaaaaaaaaaaaaaaaaaaaaaaaaaaaaaaaaaaaaaaaaaaaaaaaaaaa

SEQ ID NO: 1082 - RNA, 1652 nt, synthetic construct
  misc_feature 1..1652: note Artificial____LumSynth(1-154_C37A_N102D)_Linker(GGS)4-GGG_E c(J96)-FimH(22-300)_Linker-PGDGN_Ec(J96)-FimG(24-37) mRNA opt4
  source 1..1652: mol_type = other RNA
aggagagtcccgcagtcggcgtccagcggctctgcttgttcgtgtgtgtgtcgttgcaggccttattcaagcttaccatgcagatctacgagggcaagctgaccgccgagggcctgagattcggcatcgtggccagcagattcaaccacgccctggtggacagactggtggagggcgccatcgacgccatcgtgagacacggcggcagagaggaggacatcaccctggtgagagtgcccggcagctgggagatccccgtggccgccggcgagctggccagaaaggaggacatcgacgccgtgatcgccatcggcgtgctgatcagaggcgccaccccccacttcgactacatcgccagcgaggtgagcaagggcctggccgacctgagcctggagctgagaaagcccatcaccttcggcgtgatcaccgccgacaccctggagcaggccatcgagagagccggcaccaagcacggcaacaagggctgggaggccgccctgagcgccatcgagatggccaacctgttcaagagcctgagaggcggcagcggcggcagcggcggcagcggcggcagcggcggcggcttcgcctgcaagaccgccaacggcaccgccatccccatcggcggcggcagcgccaacgtgtacgtgaacctggcccccgtggtgaacgtgggccagaacctggtggtggacctgagcacccagatcttctgccacaacgactaccccgagaccatcaccgactacgtgaccctgcagagaggcagcgcctacggcggcgtgctgagcaacttcagcggcaccgtgaagtacagcggcagcagctaccccttccccaccaccagcgagacccccagagtggtgtacaacagcagaaccgacaagccctggcccgtggccctgtacctgacccccgtgagcagcgccggcggcgtggccatcaaggccggcagcctgatcgccgtgctgatcctgagacagaccaacaactacaacagcgacgacttccagttcgtgtggaacatctacgccaacaacgacgtggtggtgcccaccggcggctgcgacgtgagcgccagagacgtgaccgtgaccctgcccgactaccccggcagcgtgcccatccccctgaccgtgtactgcgccaagagccagaacctgggctactacctgagcggcaccaccgccgacgccggcaacagcatcttcaccaacaccgccagcttcagccccgcccagggcgtgggcgtgcagctgaccagaaacggcaccatcatccccgccaacaacaccgtgagcctgggcgccgtgggcaccagcgccgtgagcctgggcctgaccgccaactacgccagaaccggcggccaggtgaccgccggcaacgtgcagagcatcatcggcgtgaccttcgtgtaccagcccggcgacggcaacgccgacgtgaccatcaccgtgaacggcaaggtggtggccaagtgaggactagtccctgttcccagagcccacttttttttctttttttgaaataaaatagcctgtctttcagatctaaaaaaaaaaaaaaaaaaaaaaaaaaaaaaaaaaaaaaaaaaaaaaaaaaaaaaaaaaaaaaaaaaaaaaaaaaaaaaaaaaaaaaaaaaaaaaaaaaaa

SEQ ID NO: 1083 - RNA, 1670 nt, synthetic construct
  misc_feature 1..1670: note Artificial____HsIgE(1-18)_Ec(J96)-FimH(22-300)_Linker-PGDGN _Ec(J96)-FimG(24-37)_Linker-SGG_LumSynth(1-154_C37A_N102D) mRNA opt4
  source 1..1670: mol_type = other RNA
aggagagtcccgcagtcggcgtccagcggctctgcttgttcgtgtgtgtgtcgttgcaggccttattcaagcttaccatggactggacctggatcctgttcctggtggccgccgccaccagagtgcacagcttcgcctgcaagaccgccaacggcaccgccatccccatcggcggcggcagcgccaacgtgtacgtgaacctggcccccgtggtgaacgtgggccagaacctggtggtggacctgagcacccagatcttctgccacaacgactaccccgagaccatcaccgactacgtgaccctgcagagaggcagcgcctacggcggcgtgctgagcaacttcagcggcaccgtgaagtacagcggcagcagctaccccttccccaccaccagcgagacccccagagtggtgtacaacagcagaaccgacaagccctggcccgtggccctgtacctgacccccgtgagcagcgccggcggcgtggccatcaaggccggcagcctgatcgccgtgctgatcctgagacagaccaacaactacaacagcgacgacttccagttcgtgtggaacatctacgccaacaacgacgtggtggtgcccaccggcggctgcgacgtgagcgccagagacgtgaccgtgaccctgcccgactaccccggcagcgtgcccatccccctgaccgtgtactgcgccaagagccagaacctgggctactacctgagcggcaccaccgccgacgccggcaacagcatcttcaccaacaccgccagcttcagccccgcccagggcgtgggcgtgcagctgaccagaaacggcaccatcatccccgccaacaacaccgtgagcctgggcgccgtgggcaccagcgccgtgagcctgggcctgaccgccaactacgccagaaccggcggccaggtgaccgccggcaacgtgcagagcatcatcggcgtgaccttcgtgtaccagcccggcgacggcaacgccgacgtgaccatcaccgtgaacggcaaggtggtggccaagagcggcggcatgcagatctacgagggcaagctgaccgccgagggcctgagattcggcatcgtggccagcagattcaaccacgccctggtggacagactggtggagggcgccatcgacgccatcgtgagacacggcggcagagaggaggacatcaccctggtgagagtgcccggcagctgggagatccccgtggccgccggcgagctggccagaaaggaggacatcgacgccgtgatcgccatcggcgtgctgatcagaggcgccaccccccacttcgactacatcgccagcgaggtgagcaagggcctggccgacctgagcctggagctgagaaagcccatcaccttcggcgtgatcaccgccgacaccctggagcaggccatcgagagagccggcaccaagcacggcaacaagggctgggaggccgccctgagcgccatcgagatggccaacctgttcaagagcctgagatgaggactagtccctgttcccagagcccacttttttttctttttttgaaataaaatagcctgtctttcagatctaaaaaaaaaaaaaaaaaaaaaaaaaaaaaaaaaaaaaaaaaaaaaaaaaaaaaaaaaaaaaaaaaaaaaaaaaaaaaaaaaaaaaaaaaaaaaaaaaaaa

SEQ ID NO: 1084 - RNA, 1697 nt, synthetic construct
  misc_feature 1..1697: note Artificial____HsIgE(1-18)_Ec(J96)-FimH(22-300)_Linker-PGDGN _Ec(J96)-FimG(24-37)_Linker-SGG_Ferritin(5-167_N19Q) mRNA opt4
  source 1..1697: mol_type = other RNA
aggagagtcccgcagtcggcgtccagcggctctgcttgttcgtgtgtgtgtcgttgcaggccttattcaagcttaccatggactggacctggatcctgttcctggtggccgccgccaccagagtgcacagcttcgcctgcaagaccgccaacggcaccgccatccccatcggcggcggcagcgccaacgtgtacgtgaacctggcccccgtggtgaacgtgggccagaacctggtggtggacctgagcacccagatcttctgccacaacgactaccccgagaccatcaccgactacgtgaccctgcagagaggcagcgcctacggcggcgtgctgagcaacttcagcggcaccgtgaagtacagcggcagcagctaccccttccccaccaccagcgagacccccagagtggtgtacaacagcagaaccgacaagccctggcccgtggccctgtacctgacccccgtgagcagcgccggcggcgtggccatcaaggccggcagcctgatcgccgtgctgatcctgagacagaccaacaactacaacagcgacgacttccagttcgtgtggaacatctacgccaacaacgacgtggtggtgcccaccggcggctgcgacgtgagcgccagagacgtgaccgtgaccctgcccgactaccccggcagcgtgcccatccccctgaccgtgtactgcgccaagagccagaacctgggctactacctgagcggcaccaccgccgacgccggcaacagcatcttcaccaacaccgccagcttcagccccgcccagggcgtgggcgtgcagctgaccagaaacggcaccatcatccccgccaacaacaccgtgagcctgggcgccgtgggcaccagcgccgtgagcctgggcctgaccgccaactacgccagaaccggcggccaggtgaccgccggcaacgtgcagagcatcatcggcgtgaccttcgtgtaccagcccggcgacggcaacgccgacgtgaccatcaccgtgaacggcaaggtggtggccaagagcggcggcgacatcatcaagctgctgaacgagcaggtgaacaaggagatgcagagcagcaacctgtacatgagcatgagcagctggtgctacacccacagcctggacggcgccggcctgttcctgttcgaccacgccgccgaggagtacgagcacgccaagaagctgatcatcttcctgaacgagaacaacgtgcccgtgcagctgaccagcatcagcgcccccgagcacaagttcgagggcctgacccagatcttccagaaggcctacgagcacgagcagcacatcagcgagagcatcaacaacatcgtggaccacgccatcaagagcaaggaccacgccaccttcaacttcctgcagtggtacgtggccgagcagcacgaggaggaggtgctgttcaaggacatcctggacaagatcgagctgatcggcaacgagaaccacggcctgtacctggccgaccagtacgtgaagggcatcgccaagagcagaaagagctgaggactagtccctgttcccagagcccacttttttttctttttttgaaataaaatagcctgtctttcagatctaaaaaaaaaaaaaaaaaaaaaaaaaaaaaaaaaaaaaaaaaaaaaaaaaaaaaaaaaaaaaaaaaaaaaaaaaaaaaaaaaaaaaaaaaaaaaaaaaaaa

SEQ ID NO: 1085 - RNA, 1727 nt, synthetic construct
  misc_feature 1..1727: note Artificial____MmIgK(1-20)_Ec(J96)-FimH(22-300)_Linker-PGDGN _Ec(J96)-FimG(24-37)_Linker-(GGS)4_Ferritin(5-166) mRNA opt4
  source 1..1727: mol_type = other RNA
aggagagtcccgcagtcggcgtccagcggctctgcttgttcgtgtgtgtgtcgttgcaggccttattcaagcttaccatggagaccgacaccctgctgctgtgggtgctgctgctgtgggtgcccggcagcaccggcttcgcctgcaagaccgccaacggcaccgccatccccatcggcggcggcagcgccaacgtgtacgtgaacctggcccccgtggtgaacgtgggccagaacctggtggtggacctgagcacccagatcttctgccacaacgactaccccgagaccatcaccgactacgtgaccctgcagagaggcagcgcctacggcggcgtgctgagcaacttcagcggcaccgtgaagtacagcggcagcagctaccccttccccaccaccagcgagacccccagagtggtgtacaacagcagaaccgacaagccctggcccgtggccctgtacctgacccccgtgagcagcgccggcggcgtggccatcaaggccggcagcctgatcgccgtgctgatcctgagacagaccaacaactacaacagcgacgacttccagttcgtgtggaacatctacgccaacaacgacgtggtggtgcccaccggcggctgcgacgtgagcgccagagacgtgaccgtgaccctgcccgactaccccggcagcgtgcccatccccctgaccgtgtactgcgccaagagccagaacctgggctactacctgagcggcaccaccgccgacgccggcaacagcatcttcaccaacaccgccagcttcagccccgcccagggcgtgggcgtgcagctgaccagaaacggcaccatcatccccgccaacaacaccgtgagcctgggcgccgtgggcaccagcgccgtgagcctgggcctgaccgccaactacgccagaaccggcggccaggtgaccgccggcaacgtgcagagcatcatcggcgtgaccttcgtgtaccagcccggcgacggcaacgccgacgtgaccatcaccgtgaacggcaaggtggtggccaagggcggcagcggcggcagcggcggcagcggcggcagcgacatcatcaagctgctgaacgagcaggtgaacaaggagatgaacagcagcaacctgtacatgagcatgagcagctggtgctacacccacagcctggacggcgccggcctgttcctgttcgaccacgccgccgaggagtacgagcacgccaagaagctgatcatcttcctgaacgagaacaacgtgcccgtgcagctgaccagcatcagcgcccccgagcacaagttcgagggcctgacccagatcttccagaaggcctacgagcacgagcagcacatcagcgagagcatcaacaacatcgtggaccacgccatcaagagcaaggaccacgccaccttcaacttcctgcagtggtacgtggccgagcagcacgaggaggaggtgctgttcaaggacatcctggacaagatcgagctgatcggcaacgagaaccacggcctgtacctggccgaccagtacgtgaagggcatcgccaagagcagaaagtgaggactagtccctgttcccagagcccacttttttttctttttttgaaataaaatagcctgtctttcagatctaaaaaaaaaaaaaaaaaaaaaaaaaaaaaaaaaaaaaaaaaaaaaaaaaaaaaaaaaaaaaaaaaaaaaaaaaaaaaaaaaaaaaaaaaaaaaaaaaaaa

SEQ ID NO: 1086 - RNA, 1370 nt, synthetic construct
  misc_feature 1..1370: note Artificial____HsIgE(1-18)_Ec(J96)-FimH(22-300)_Linker-PGDGN _Ec(J96)-FimG(24-37)_TMdomain-HA(510-566) mRNA opt4
  source 1..1370: mol_type = other RNA
aggagagtcccgcagtcggcgtccagcggctctgcttgttcgtgtgtgtgtcgttgcaggccttattcaagcttaccatggactggacctggatcctgttcctggtggccgccgccaccagagtgcacagcttcgcctgcaagaccgccaacggcaccgccatccccatcggcggcggcagcgccaacgtgtacgtgaacctggcccccgtggtgaacgtgggccagaacctggtggtggacctgagcacccagatcttctgccacaacgactaccccgagaccatcaccgactacgtgaccctgcagagaggcagcgcctacggcggcgtgctgagcaacttcagcggcaccgtgaagtacagcggcagcagctaccccttccccaccaccagcgagacccccagagtggtgtacaacagcagaaccgacaagccctggcccgtggccctgtacctgacccccgtgagcagcgccggcggcgtggccatcaaggccggcagcctgatcgccgtgctgatcctgagacagaccaacaactacaacagcgacgacttccagttcgtgtggaacatctacgccaacaacgacgtggtggtgcccaccggcggctgcgacgtgagcgccagagacgtgaccgtgaccctgcccgactaccccggcagcgtgcccatccccctgaccgtgtactgcgccaagagccagaacctgggctactacctgagcggcaccaccgccgacgccggcaacagcatcttcaccaacaccgccagcttcagccccgcccagggcgtgggcgtgcagctgaccagaaacggcaccatcatccccgccaacaacaccgtgagcctgggcgccgtgggcaccagcgccgtgagcctgggcctgaccgccaactacgccagaaccggcggccaggtgaccgccggcaacgtgcagagcatcatcggcgtgaccttcgtgtaccagcccggcgacggcaacgccgacgtgaccatcaccgtgaacggcaaggtggtggccaaggccaagctgaacagagaggagatcgacggcgtgaagctggagagcaccagaatctaccagatcctggccatctacagcaccgtggccagcagcctggtgctggtggtgagcctgggcgccatcagcttctggatgtgcagcaacggcagcctgcagtgcagaatctgcatctgaggactagtccctgttcccagagcccacttttttttctttttttgaaataaaatagcctgtctttcagatctaaaaaaaaaaaaaaaaaaaaaaaaaaaaaaaaaaaaaaaaaaaaaaaaaaaaaaaaaaaaaaaaaaaaaaaaaaaaaaaaaaaaaaaaaaaaaaaaaaaa

SEQ ID NO: 1087 - RNA, 1703 nt, synthetic construct
  misc_feature 1..1703: note Artificial____HsIgE(1-18)_LumSynth(1-154_C37A_N102D)_Linker (GGS)4-GGG_Ec(J96)-FimH(22-300)_Linker-PGDGN_Ec(J96)-FimG(2 4-37) mRNA opt4
  source 1..1703: mol_type = other RNA
aggagagtcccgcagtcggcgtccagcggctctgcttgttcgtgtgtgtgtcgttgcaggccttattcaagcttaccatggactggacctggatcctgttcctggtggccgccgccaccagagtgcacagccagatctacgagggcaagctgaccgccgagggcctgagattcggcatcgtggccagcagattcaaccacgccctggtggacagactggtggagggcgccatcgacgccatcgtgagacacggcggcagagaggaggacatcaccctggtgagagtgcccggcagctgggagatccccgtggccgccggcgagctggccagaaaggaggacatcgacgccgtgatcgccatcggcgtgctgatcagaggcgccaccccccacttcgactacatcgccagcgaggtgagcaagggcctggccgacctgagcctggagctgagaaagcccatcaccttcggcgtgatcaccgccgacaccctggagcaggccatcgagagagccggcaccaagcacggcaacaagggctgggaggccgccctgagcgccatcgagatggccaacctgttcaagagcctgagaggcggcagcggcggcagcggcggcagcggcggcagcggcggcggcttcgcctgcaagaccgccaacggcaccgccatccccatcggcggcggcagcgccaacgtgtacgtgaacctggcccccgtggtgaacgtgggccagaacctggtggtggacctgagcacccagatcttctgccacaacgactaccccgagaccatcaccgactacgtgaccctgcagagaggcagcgcctacggcggcgtgctgagcaacttcagcggcaccgtgaagtacagcggcagcagctaccccttccccaccaccagcgagacccccagagtggtgtacaacagcagaaccgacaagccctggcccgtggccctgtacctgacccccgtgagcagcgccggcggcgtggccatcaaggccggcagcctgatcgccgtgctgatcctgagacagaccaacaactacaacagcgacgacttccagttcgtgtggaacatctacgccaacaacgacgtggtggtgcccaccggcggctgcgacgtgagcgccagagacgtgaccgtgaccctgcccgactaccccggcagcgtgcccatccccctgaccgtgtactgcgccaagagccagaacctgggctactacctgagcggcaccaccgccgacgccggcaacagcatcttcaccaacaccgccagcttcagccccgcccagggcgtgggcgtgcagctgaccagaaacggcaccatcatccccgccaacaacaccgtgagcctgggcgccgtgggcaccagcgccgtgagcctgggcctgaccgccaactacgccagaaccggcggccaggtgaccgccggcaacgtgcagagcatcatcggcgtgaccttcgtgtaccagcccggcgacggcaacgccgacgtgaccatcaccgtgaacggcaaggtggtggccaagtgaggactagtccctgttcccagagcccacttttttttctttttttgaaataaaatagcctgtctttcagatctaaaaaaaaaaaaaaaaaaaaaaaaaaaaaaaaaaaaaaaaaaaaaaaaaaaaaaaaaaaaaaaaaaaaaaaaaaaaaaaaaaaaaaaaaaaaaaaaaaaa

SEQ ID NO: 1088 - RNA, 1670 nt, synthetic construct
  misc_feature 1..1670: note Artificial____HsIgE(1-18)_Ec(J96)-FimH(22-300_N28S_N91S_N24 9Q)_Linker-PGDGN_Ec(J96)-FimG(24-37)_Linker-SGG_LumSynth(1- 154_C37A_N102D) mRNA opt4
  source 1..1670: mol_type = other RNA
aggagagtcccgcagtcggcgtccagcggctctgcttgttcgtgtgtgtgtcgttgcaggccttattcaagcttaccatggactggacctggatcctgttcctggtggccgccgccaccagagtgcacagcttcgcctgcaagaccgccagcggcaccgccatccccatcggcggcggcagcgccaacgtgtacgtgaacctggcccccgtggtgaacgtgggccagaacctggtggtggacctgagcacccagatcttctgccacaacgactaccccgagaccatcaccgactacgtgaccctgcagagaggcagcgcctacggcggcgtgctgagcagcttcagcggcaccgtgaagtacagcggcagcagctaccccttccccaccaccagcgagacccccagagtggtgtacaacagcagaaccgacaagccctggcccgtggccctgtacctgacccccgtgagcagcgccggcggcgtggccatcaaggccggcagcctgatcgccgtgctgatcctgagacagaccaacaactacaacagcgacgacttccagttcgtgtggaacatctacgccaacaacgacgtggtggtgcccaccggcggctgcgacgtgagcgccagagacgtgaccgtgaccctgcccgactaccccggcagcgtgcccatccccctgaccgtgtactgcgccaagagccagaacctgggctactacctgagcggcaccaccgccgacgccggcaacagcatcttcaccaacaccgccagcttcagccccgcccagggcgtgggcgtgcagctgaccagacagggcaccatcatccccgccaacaacaccgtgagcctgggcgccgtgggcaccagcgccgtgagcctgggcctgaccgccaactacgccagaaccggcggccaggtgaccgccggcaacgtgcagagcatcatcggcgtgaccttcgtgtaccagcccggcgacggcaacgccgacgtgaccatcaccgtgaacggcaaggtggtggccaagagcggcggcatgcagatctacgagggcaagctgaccgccgagggcctgagattcggcatcgtggccagcagattcaaccacgccctggtggacagactggtggagggcgccatcgacgccatcgtgagacacggcggcagagaggaggacatcaccctggtgagagtgcccggcagctgggagatccccgtggccgccggcgagctggccagaaaggaggacatcgacgccgtgatcgccatcggcgtgctgatcagaggcgccaccccccacttcgactacatcgccagcgaggtgagcaagggcctggccgacctgagcctggagctgagaaagcccatcaccttcggcgtgatcaccgccgacaccctggagcaggccatcgagagagccggcaccaagcacggcaacaagggctgggaggccgccctgagcgccatcgagatggccaacctgttcaagagcctgagatgaggactagtccctgttcccagagcccacttttttttctttttttgaaataaaatagcctgtctttcagatctaaaaaaaaaaaaaaaaaaaaaaaaaaaaaaaaaaaaaaaaaaaaaaaaaaaaaaaaaaaaaaaaaaaaaaaaaaaaaaaaaaaaaaaaaaaaaaaaaaaa

SEQ ID NO: 1089 - RNA, 1670 nt, synthetic construct
  misc_feature 1..1670: note Artificial____HsIgE(1-18)_Ec(J96)-FimH(22-300_N28S_N91S_N24 9Q_N256D)_Linker-PGDGN_Ec(J96)-FimG(24-37)_Linker-SGG_LumSy nth(1-154_C37A_N102D) mRNA opt4
  source 1..1670: mol_type = other RNA
aggagagtcccgcagtcggcgtccagcggctctgcttgttcgtgtgtgtgtcgttgcaggccttattcaagcttaccatggactggacctggatcctgttcctggtggccgccgccaccagagtgcacagcttcgcctgcaagaccgccagcggcaccgccatccccatcggcggcggcagcgccaacgtgtacgtgaacctggcccccgtggtgaacgtgggccagaacctggtggtggacctgagcacccagatcttctgccacaacgactaccccgagaccatcaccgactacgtgaccctgcagagaggcagcgcctacggcggcgtgctgagcagcttcagcggcaccgtgaagtacagcggcagcagctaccccttccccaccaccagcgagacccccagagtggtgtacaacagcagaaccgacaagccctggcccgtggccctgtacctgacccccgtgagcagcgccggcggcgtggccatcaaggccggcagcctgatcgccgtgctgatcctgagacagaccaacaactacaacagcgacgacttccagttcgtgtggaacatctacgccaacaacgacgtggtggtgcccaccggcggctgcgacgtgagcgccagagacgtgaccgtgaccctgcccgactaccccggcagcgtgcccatccccctgaccgtgtactgcgccaagagccagaacctgggctactacctgagcggcaccaccgccgacgccggcaacagcatcttcaccaacaccgccagcttcagccccgcccagggcgtgggcgtgcagctgaccagacagggcaccatcatccccgccgacaacaccgtgagcctgggcgccgtgggcaccagcgccgtgagcctgggcctgaccgccaactacgccagaaccggcggccaggtgaccgccggcaacgtgcagagcatcatcggcgtgaccttcgtgtaccagcccggcgacggcaacgccgacgtgaccatcaccgtgaacggcaaggtggtggccaagagcggcggcatgcagatctacgagggcaagctgaccgccgagggcctgagattcggcatcgtggccagcagattcaaccacgccctggtggacagactggtggagggcgccatcgacgccatcgtgagacacggcggcagagaggaggacatcaccctggtgagagtgcccggcagctgggagatccccgtggccgccggcgagctggccagaaaggaggacatcgacgccgtgatcgccatcggcgtgctgatcagaggcgccaccccccacttcgactacatcgccagcgaggtgagcaagggcctggccgacctgagcctggagctgagaaagcccatcaccttcggcgtgatcaccgccgacaccctggagcaggccatcgagagagccggcaccaagcacggcaacaagggctgggaggccgccctgagcgccatcgagatggccaacctgttcaagagcctgagatgaggactagtccctgttcccagagcccacttttttttctttttttgaaataaaatagcctgtctttcagatctaaaaaaaaaaaaaaaaaaaaaaaaaaaaaaaaaaaaaaaaaaaaaaaaaaaaaaaaaaaaaaaaaaaaaaaaaaaaaaaaaaaaaaaaaaaaaaaaaaaa

SEQ ID NO: 1090 - RNA, 1670 nt, synthetic construct
  misc_feature 1..1670: note Artificial____HsIgE(1-18)_Ec(J96)-FimH(22-300_N28S_V48C_L55 C_N91S_N249Q)_Linker-PGDGN_Ec(J96)-FimG(24-37)_Linker-SGG_L umSynth(1-154_C37A_N102D) mRNA opt4
  source 1..1670: mol_type = other RNA
aggagagtcccgcagtcggcgtccagcggctctgcttgttcgtgtgtgtgtcgttgcaggccttattcaagcttaccatggactggacctggatcctgttcctggtggccgccgccaccagagtgcacagcttcgcctgcaagaccgccagcggcaccgccatccccatcggcggcggcagcgccaacgtgtacgtgaacctggccccctgcgtgaacgtgggccagaactgcgtggtggacctgagcacccagatcttctgccacaacgactaccccgagaccatcaccgactacgtgaccctgcagagaggcagcgcctacggcggcgtgctgagcagcttcagcggcaccgtgaagtacagcggcagcagctaccccttccccaccaccagcgagacccccagagtggtgtacaacagcagaaccgacaagccctggcccgtggccctgtacctgacccccgtgagcagcgccggcggcgtggccatcaaggccggcagcctgatcgccgtgctgatcctgagacagaccaacaactacaacagcgacgacttccagttcgtgtggaacatctacgccaacaacgacgtggtggtgcccaccggcggctgcgacgtgagcgccagagacgtgaccgtgaccctgcccgactaccccggcagcgtgcccatccccctgaccgtgtactgcgccaagagccagaacctgggctactacctgagcggcaccaccgccgacgccggcaacagcatcttcaccaacaccgccagcttcagccccgcccagggcgtgggcgtgcagctgaccagacagggcaccatcatccccgccaacaacaccgtgagcctgggcgccgtgggcaccagcgccgtgagcctgggcctgaccgccaactacgccagaaccggcggccaggtgaccgccggcaacgtgcagagcatcatcggcgtgaccttcgtgtaccagcccggcgacggcaacgccgacgtgaccatcaccgtgaacggcaaggtggtggccaagagcggcggcatgcagatctacgagggcaagctgaccgccgagggcctgagattcggcatcgtggccagcagattcaaccacgccctggtggacagactggtggagggcgccatcgacgccatcgtgagacacggcggcagagaggaggacatcaccctggtgagagtgcccggcagctgggagatccccgtggccgccggcgagctggccagaaaggaggacatcgacgccgtgatcgccatcggcgtgctgatcagaggcgccaccccccacttcgactacatcgccagcgaggtgagcaagggcctggccgacctgagcctggagctgagaaagcccatcaccttcggcgtgatcaccgccgacaccctggagcaggccatcgagagagccggcaccaagcacggcaacaagggctgggaggccgccctgagcgccatcgagatggccaacctgttcaagagcctgagatgaggactagtccctgttcccagagcccacttttttttctttttttgaaataaaatagcctgtctttcagatctaaaaaaaaaaaaaaaaaaaaaaaaaaaaaaaaaaaaaaaaaaaaaaaaaaaaaaaaaaaaaaaaaaaaaaaaaaaaaaaaaaaaaaaaaaaaaaaaaaaa

SEQ ID NO: 1091 - RNA, 1670 nt, synthetic construct
  misc_feature 1..1670: note Artificial____HsIgE(1-18)_Ec(J96)-FimH(22-300_F165V)_Linker -PGDGN_Ec(J96)-FimG(24-37)_Linker-SGG_LumSynth(1-154_C37A_N 102D) mRNA opt4
  source 1..1670: mol_type = other RNA
aggagagtcccgcagtcggcgtccagcggctctgcttgttcgtgtgtgtgtcgttgcaggccttattcaagcttaccatggactggacctggatcctgttcctggtggccgccgccaccagagtgcacagcttcgcctgcaagaccgccaacggcaccgccatccccatcggcggcggcagcgccaacgtgtacgtgaacctggcccccgtggtgaacgtgggccagaacctggtggtggacctgagcacccagatcttctgccacaacgactaccccgagaccatcaccgactacgtgaccctgcagagaggcagcgcctacggcggcgtgctgagcaacttcagcggcaccgtgaagtacagcggcagcagctaccccttccccaccaccagcgagacccccagagtggtgtacaacagcagaaccgacaagccctggcccgtggccctgtacctgacccccgtgagcagcgccggcggcgtggccatcaaggccggcagcctgatcgccgtgctgatcctgagacagaccaacaactacaacagcgacgacttccaggtggtgtggaacatctacgccaacaacgacgtggtggtgcccaccggcggctgcgacgtgagcgccagagacgtgaccgtgaccctgcccgactaccccggcagcgtgcccatccccctgaccgtgtactgcgccaagagccagaacctgggctactacctgagcggcaccaccgccgacgccggcaacagcatcttcaccaacaccgccagcttcagccccgcccagggcgtgggcgtgcagctgaccagaaacggcaccatcatccccgccaacaacaccgtgagcctgggcgccgtgggcaccagcgccgtgagcctgggcctgaccgccaactacgccagaaccggcggccaggtgaccgccggcaacgtgcagagcatcatcggcgtgaccttcgtgtaccagcccggcgacggcaacgccgacgtgaccatcaccgtgaacggcaaggtggtggccaagagcggcggcatgcagatctacgagggcaagctgaccgccgagggcctgagattcggcatcgtggccagcagattcaaccacgccctggtggacagactggtggagggcgccatcgacgccatcgtgagacacggcggcagagaggaggacatcaccctggtgagagtgcccggcagctgggagatccccgtggccgccggcgagctggccagaaaggaggacatcgacgccgtgatcgccatcggcgtgctgatcagaggcgccaccccccacttcgactacatcgccagcgaggtgagcaagggcctggccgacctgagcctggagctgagaaagcccatcaccttcggcgtgatcaccgccgacaccctggagcaggccatcgagagagccggcaccaagcacggcaacaagggctgggaggccgccctgagcgccatcgagatggccaacctgttcaagagcctgagatgaggactagtccctgttcccagagcccacttttttttctttttttgaaataaaatagcctgtctttcagatctaaaaaaaaaaaaaaaaaaaaaaaaaaaaaaaaaaaaaaaaaaaaaaaaaaaaaaaaaaaaaaaaaaaaaaaaaaaaaaaaaaaaaaaaaaaaaaaaaaaa

SEQ ID NO: 1092 - RNA, 1697 nt, synthetic construct
  misc_feature 1..1697: note Artificial____HsIgE(1-18)_Ec(J96)-FimH(22-300_N28S_N91S_N24 9Q)_Linker-PGDGN_Ec(J96)-FimG(24-37)_Linker-SGG_Ferritin(5- 167_N19Q) mRNA opt4
  source 1..1697: mol_type = other RNA
aggagagtcccgcagtcggcgtccagcggctctgcttgttcgtgtgtgtgtcgttgcaggccttattcaagcttaccatggactggacctggatcctgttcctggtggccgccgccaccagagtgcacagcttcgcctgcaagaccgccagcggcaccgccatccccatcggcggcggcagcgccaacgtgtacgtgaacctggcccccgtggtgaacgtgggccagaacctggtggtggacctgagcacccagatcttctgccacaacgactaccccgagaccatcaccgactacgtgaccctgcagagaggcagcgcctacggcggcgtgctgagcagcttcagcggcaccgtgaagtacagcggcagcagctaccccttccccaccaccagcgagacccccagagtggtgtacaacagcagaaccgacaagccctggcccgtggccctgtacctgacccccgtgagcagcgccggcggcgtggccatcaaggccggcagcctgatcgccgtgctgatcctgagacagaccaacaactacaacagcgacgacttccagttcgtgtggaacatctacgccaacaacgacgtggtggtgcccaccggcggctgcgacgtgagcgccagagacgtgaccgtgaccctgcccgactaccccggcagcgtgcccatccccctgaccgtgtactgcgccaagagccagaacctgggctactacctgagcggcaccaccgccgacgccggcaacagcatcttcaccaacaccgccagcttcagccccgcccagggcgtgggcgtgcagctgaccagacagggcaccatcatccccgccaacaacaccgtgagcctgggcgccgtgggcaccagcgccgtgagcctgggcctgaccgccaactacgccagaaccggcggccaggtgaccgccggcaacgtgcagagcatcatcggcgtgaccttcgtgtaccagcccggcgacggcaacgccgacgtgaccatcaccgtgaacggcaaggtggtggccaagagcggcggcgacatcatcaagctgctgaacgagcaggtgaacaaggagatgcagagcagcaacctgtacatgagcatgagcagctggtgctacacccacagcctggacggcgccggcctgttcctgttcgaccacgccgccgaggagtacgagcacgccaagaagctgatcatcttcctgaacgagaacaacgtgcccgtgcagctgaccagcatcagcgcccccgagcacaagttcgagggcctgacccagatcttccagaaggcctacgagcacgagcagcacatcagcgagagcatcaacaacatcgtggaccacgccatcaagagcaaggaccacgccaccttcaacttcctgcagtggtacgtggccgagcagcacgaggaggaggtgctgttcaaggacatcctggacaagatcgagctgatcggcaacgagaaccacggcctgtacctggccgaccagtacgtgaagggcatcgccaagagcagaaagagctgaggactagtccctgttcccagagcccacttttttttctttttttgaaataaaatagcctgtctttcagatctaaaaaaaaaaaaaaaaaaaaaaaaaaaaaaaaaaaaaaaaaaaaaaaaaaaaaaaaaaaaaaaaaaaaaaaaaaaaaaaaaaaaaaaaaaaaaaaaaaaa

SEQ ID NO: 1093 - RNA, 1697 nt, synthetic construct
  misc_feature 1..1697: note Artificial____HsIgE(1-18)_Ec(J96)-FimH(22-300_N28S_N91S_N24 9Q_N256D)_Linker-PGDGN_Ec(J96)-FimG(24-37)_Linker-SGG_Ferri tin(5-167_N19Q) mRNA opt4
  source 1..1697: mol_type = other RNA
aggagagtcccgcagtcggcgtccagcggctctgcttgttcgtgtgtgtgtcgttgcaggccttattcaagcttaccatggactggacctggatcctgttcctggtggccgccgccaccagagtgcacagcttcgcctgcaagaccgccagcggcaccgccatccccatcggcggcggcagcgccaacgtgtacgtgaacctggcccccgtggtgaacgtgggccagaacctggtggtggacctgagcacccagatcttctgccacaacgactaccccgagaccatcaccgactacgtgaccctgcagagaggcagcgcctacggcggcgtgctgagcagcttcagcggcaccgtgaagtacagcggcagcagctaccccttccccaccaccagcgagacccccagagtggtgtacaacagcagaaccgacaagccctggcccgtggccctgtacctgacccccgtgagcagcgccggcggcgtggccatcaaggccggcagcctgatcgccgtgctgatcctgagacagaccaacaactacaacagcgacgacttccagttcgtgtggaacatctacgccaacaacgacgtggtggtgcccaccggcggctgcgacgtgagcgccagagacgtgaccgtgaccctgcccgactaccccggcagcgtgcccatccccctgaccgtgtactgcgccaagagccagaacctgggctactacctgagcggcaccaccgccgacgccggcaacagcatcttcaccaacaccgccagcttcagccccgcccagggcgtgggcgtgcagctgaccagacagggcaccatcatccccgccgacaacaccgtgagcctgggcgccgtgggcaccagcgccgtgagcctgggcctgaccgccaactacgccagaaccggcggccaggtgaccgccggcaacgtgcagagcatcatcggcgtgaccttcgtgtaccagcccggcgacggcaacgccgacgtgaccatcaccgtgaacggcaaggtggtggccaagagcggcggcgacatcatcaagctgctgaacgagcaggtgaacaaggagatgcagagcagcaacctgtacatgagcatgagcagctggtgctacacccacagcctggacggcgccggcctgttcctgttcgaccacgccgccgaggagtacgagcacgccaagaagctgatcatcttcctgaacgagaacaacgtgcccgtgcagctgaccagcatcagcgcccccgagcacaagttcgagggcctgacccagatcttccagaaggcctacgagcacgagcagcacatcagcgagagcatcaacaacatcgtggaccacgccatcaagagcaaggaccacgccaccttcaacttcctgcagtggtacgtggccgagcagcacgaggaggaggtgctgttcaaggacatcctggacaagatcgagctgatcggcaacgagaaccacggcctgtacctggccgaccagtacgtgaagggcatcgccaagagcagaaagagctgaggactagtccctgttcccagagcccacttttttttctttttttgaaataaaatagcctgtctttcagatctaaaaaaaaaaaaaaaaaaaaaaaaaaaaaaaaaaaaaaaaaaaaaaaaaaaaaaaaaaaaaaaaaaaaaaaaaaaaaaaaaaaaaaaaaaaaaaaaaaaa

SEQ ID NO: 1094 - RNA, 1697 nt, synthetic construct
  misc_feature 1..1697: note Artificial____HsIgE(1-18)_Ec(J96)-FimH(22-300_N28S_V48C_L55 C_N91S_N249Q)_Linker-PGDGN_Ec(J96)-FimG(24-37)_Linker-SGG_F erritin(5-167_N19Q) mRNA opt4
  source 1..1697: mol_type = other RNA
aggagagtcccgcagtcggcgtccagcggctctgcttgttcgtgtgtgtgtcgttgcaggccttattcaagcttaccatggactggacctggatcctgttcctggtggccgccgccaccagagtgcacagcttcgcctgcaagaccgccagcggcaccgccatccccatcggcggcggcagcgccaacgtgtacgtgaacctggccccctgcgtgaacgtgggccagaactgcgtggtggacctgagcacccagatcttctgccacaacgactaccccgagaccatcaccgactacgtgaccctgcagagaggcagcgcctacggcggcgtgctgagcagcttcagcggcaccgtgaagtacagcggcagcagctaccccttccccaccaccagcgagacccccagagtggtgtacaacagcagaaccgacaagccctggcccgtggccctgtacctgacccccgtgagcagcgccggcggcgtggccatcaaggccggcagcctgatcgccgtgctgatcctgagacagaccaacaactacaacagcgacgacttccagttcgtgtggaacatctacgccaacaacgacgtggtggtgcccaccggcggctgcgacgtgagcgccagagacgtgaccgtgaccctgcccgactaccccggcagcgtgcccatccccctgaccgtgtactgcgccaagagccagaacctgggctactacctgagcggcaccaccgccgacgccggcaacagcatcttcaccaacaccgccagcttcagccccgcccagggcgtgggcgtgcagctgaccagacagggcaccatcatccccgccaacaacaccgtgagcctgggcgccgtgggcaccagcgccgtgagcctgggcctgaccgccaactacgccagaaccggcggccaggtgaccgccggcaacgtgcagagcatcatcggcgtgaccttcgtgtaccagcccggcgacggcaacgccgacgtgaccatcaccgtgaacggcaaggtggtggccaagagcggcggcgacatcatcaagctgctgaacgagcaggtgaacaaggagatgcagagcagcaacctgtacatgagcatgagcagctggtgctacacccacagcctggacggcgccggcctgttcctgttcgaccacgccgccgaggagtacgagcacgccaagaagctgatcatcttcctgaacgagaacaacgtgcccgtgcagctgaccagcatcagcgcccccgagcacaagttcgagggcctgacccagatcttccagaaggcctacgagcacgagcagcacatcagcgagagcatcaacaacatcgtggaccacgccatcaagagcaaggaccacgccaccttcaacttcctgcagtggtacgtggccgagcagcacgaggaggaggtgctgttcaaggacatcctggacaagatcgagctgatcggcaacgagaaccacggcctgtacctggccgaccagtacgtgaagggcatcgccaagagcagaaagagctgaggactagtccctgttcccagagcccacttttttttctttttttgaaataaaatagcctgtctttcagatctaaaaaaaaaaaaaaaaaaaaaaaaaaaaaaaaaaaaaaaaaaaaaaaaaaaaaaaaaaaaaaaaaaaaaaaaaaaaaaaaaaaaaaaaaaaaaaaaaaaa

SEQ ID NO: 1095 - RNA, 1697 nt, synthetic construct
  misc_feature 1..1697: note Artificial____HsIgE(1-18)_Ec(J96)-FimH(22-300_F165V)_Linker -PGDGN_Ec(J96)-FimG(24-37)_Linker-SGG_Ferritin(5-167_N19Q) mRNA opt4
  source 1..1697: mol_type = other RNA
aggagagtcccgcagtcggcgtccagcggctctgcttgttcgtgtgtgtgtcgttgcaggccttattcaagcttaccatggactggacctggatcctgttcctggtggccgccgccaccagagtgcacagcttcgcctgcaagaccgccaacggcaccgccatccccatcggcggcggcagcgccaacgtgtacgtgaacctggcccccgtggtgaacgtgggccagaacctggtggtggacctgagcacccagatcttctgccacaacgactaccccgagaccatcaccgactacgtgaccctgcagagaggcagcgcctacggcggcgtgctgagcaacttcagcggcaccgtgaagtacagcggcagcagctaccccttccccaccaccagcgagacccccagagtggtgtacaacagcagaaccgacaagccctggcccgtggccctgtacctgacccccgtgagcagcgccggcggcgtggccatcaaggccggcagcctgatcgccgtgctgatcctgagacagaccaacaactacaacagcgacgacttccaggtggtgtggaacatctacgccaacaacgacgtggtggtgcccaccggcggctgcgacgtgagcgccagagacgtgaccgtgaccctgcccgactaccccggcagcgtgcccatccccctgaccgtgtactgcgccaagagccagaacctgggctactacctgagcggcaccaccgccgacgccggcaacagcatcttcaccaacaccgccagcttcagccccgcccagggcgtgggcgtgcagctgaccagaaacggcaccatcatccccgccaacaacaccgtgagcctgggcgccgtgggcaccagcgccgtgagcctgggcctgaccgccaactacgccagaaccggcggccaggtgaccgccggcaacgtgcagagcatcatcggcgtgaccttcgtgtaccagcccggcgacggcaacgccgacgtgaccatcaccgtgaacggcaaggtggtggccaagagcggcggcgacatcatcaagctgctgaacgagcaggtgaacaaggagatgcagagcagcaacctgtacatgagcatgagcagctggtgctacacccacagcctggacggcgccggcctgttcctgttcgaccacgccgccgaggagtacgagcacgccaagaagctgatcatcttcctgaacgagaacaacgtgcccgtgcagctgaccagcatcagcgcccccgagcacaagttcgagggcctgacccagatcttccagaaggcctacgagcacgagcagcacatcagcgagagcatcaacaacatcgtggaccacgccatcaagagcaaggaccacgccaccttcaacttcctgcagtggtacgtggccgagcagcacgaggaggaggtgctgttcaaggacatcctggacaagatcgagctgatcggcaacgagaaccacggcctgtacctggccgaccagtacgtgaagggcatcgccaagagcagaaagagctgaggactagtccctgttcccagagcccacttttttttctttttttgaaataaaatagcctgtctttcagatctaaaaaaaaaaaaaaaaaaaaaaaaaaaaaaaaaaaaaaaaaaaaaaaaaaaaaaaaaaaaaaaaaaaaaaaaaaaaaaaaaaaaaaaaaaaaaaaaaaaa

SEQ ID NO: 1096 - RNA, 974 nt, synthetic construct
  misc_feature 1..974: note Artificial____Ec(J96)-FimC(1-36)_Ec(J96)-FimC(37-241) mRNA opt5
  source 1..974: mol_type = other RNA
aggagagtcccgcagtcggcgtccagcggctctgcttgttcgtgtgtgtgtcgttgcaggccttattcaagcttaccatgagcaacaagaatgtgaacgtcagaaaatcccaggagatcaccttctgcctgctcgccggcattctgatgtttatggctatgatggttgccgggcgggcggaagctggagtggcccttggcgccacacgcgtgatctaccccgctgggcaaaagcaggtccagctggccgtgacgaataacgacgaaaattctacctatctcattcagagctgggttgagaacgctgatggagtgaaagacggcagattcatcgtcacacctccgctgtttgccatgaaggggaaaaaggagaatacccttcggattctggatgcgacaaacaatcaactcccccaggaccgcgaatccctgttctggatgaacgtgaaggccatcccttctatggataaaagcaagctgaccgagaatacactccagctggctatcatttccagaatcaaactttactatcggcccgccaagctggctctccctcccgaccaggccgcggagaaactgcgctttagacggtctgccaacagccttaccctgattaatcctacgccgtactatctcaccgttacagaactgaacgctggaacccgcgtgctggagaatgccctcgtgccccctatgggcgaatccacagtcaagctgcccagcgatgctggctctaacatcacctacagaacgattaacgactatggggcccttacacctaagatgaccggagtgatggagtgaggactagtccctgttcccagagcccacttttttttctttttttgaaataaaatagcctgtctttcagatctaaaaaaaaaaaaaaaaaaaaaaaaaaaaaaaaaaaaaaaaaaaaaaaaaaaaaaaaaaaaaaaaaaaaaaaaaaaaaaaaaaaaaaaaaaaaaaaaaaaa

SEQ ID NO: 1097 - RNA, 920 nt, synthetic construct
  misc_feature 1..920: note = Artificial____HsIgE(1-18)_Ec(J96)-FimC(37-241) mRNA opt5
  source 1..920: mol_type = other RNA
aggagagtcccgcagtcggcgtccagcggctctgcttgttcgtgtgtgtgtcgttgcaggccttattcaagcttaccatggactggacctggatcctgttcctcgtggccgctgccacaagagtccacagcggcgttgcgctgggggctacgcgggtgatttaccccgccggacagaagcaagtgcagcttgccgtcaccaacaatgatgagaactccacatatctgatccagtcttgggtggaaaatgctgacggcgttaaagatgggcgctttattgtgacccctcccctcttcgccatgaagggaaagaaggagaacacactgagaatccttgacgctaccaataaccagctgccgcaagatcgggaaagcctcttttggatgaatgtcaaagccattccttccatggacaagtctaagctgacagagaacaccctgcagctcgcgatcatcagccgcattaaactgtactatagacccgccaaacttgctctgcctcccgatcaggccgctgaaaaactccggttccgcagatccgccaattctctgacgcttatcaaccctaccccgtactatctgacagtgaccgagctcaatgcgggcacacgggttctggagaacgccctggtgccccctatgggggaaagcaccgtcaagctcccctccgacgctggaagcaatattacgtaccgcacaatcaacgattatggcgccctgacccctaaaatgacaggcgtgatggagtgaggactagtccctgttcccagagcccacttttttttctttttttgaaataaaatagcctgtctttcagatctaaaaaaaaaaaaaaaaaaaaaaaaaaaaaaaaaaaaaaaaaaaaaaaaaaaaaaaaaaaaaaaaaaaaaaaaaaaaaaaaaaaaaaaaaaaaaaaaaaaa

SEQ ID NO: 1098 - RNA, 1151 nt, synthetic construct
  misc_feature 1..1151: note Artificial____Ec(J96)-FimH(1-21)_Ec(J96)-FimH(22-300) mRNA opt5
  source 1..1151: mol_type = other RNA
aggagagtcccgcagtcggcgtccagcggctctgcttgttcgtgtgtgtgtcgttgcaggccttattcaagcttaccatgaagagagtgatcaccctgttcgccgtcctcctgatgggctggagcgttaacgcttggtcctttgcctgcaaaacagcgaatgggacggctattcccatcggaggcgggtctgccaacgtgtacgtgaatcttgcccctgtcgtgaacgttggacagaatctggtggtcgacctcagcacccaaattttctgtcacaacgattatccggagacaatcaccgactacgtgacactgcagcggggctccgcttatgggggagttctttctaattttagcggcaccgtgaagtactccggctctagctatcccttccctacaacctccgaaacgccccgcgtcgtgtacaacagcagaaccgataaaccttggcccgtggccctgtatctcacacctgtctcttccgctgggggagttgccattaaggcgggcagcctgatcgccgtgctgatcctccggcagaccaataactacaattctgacgattttcagttcgtgtggaacatttacgctaataacgacgtcgtggttccgacagggggatgcgatgtgtccgcccgcgacgtcaccgtgacgctgcccgattatcctggcagcgttcccatccctcttacagtgtactgtgctaaatctcaaaatctggggtattacctctccggaaccacagccgacgcgggcaacagcatttttaccaacaccgcctccttctctcccgctcagggcgtcggggtgcagctgacaagaaatggaacgatcattccggccaacaataccgtcagccttggcgctgtggggacatccgccgttagcctgggactcaccgccaactatgctcggacaggcggacaggtgaccgcggggaatgtccaatctatcattggcgtgacgtttgtttaccagtgaggactagtccctgttcccagagcccacttttttttctttttttgaaataaaatagcctgtctttcagatctaaaaaaaaaaaaaaaaaaaaaaaaaaaaaaaaaaaaaaaaaaaaaaaaaaaaaaaaaaaaaaaaaaaaaaaaaaaaaaaaaaaaaaaaaaaaaaaaaaaa

SEQ ID NO: 1099 - RNA, 1142 nt, synthetic construct
  misc_feature 1..1142: note = Artificial____HsIgE(1-18)_Ec(J96)-FimH(22-300) mRNA opt5
  source 1..1142: mol_type = other RNA
aggagagtcccgcagtcggcgtccagcggctctgcttgttcgtgtgtgtgtcgttgcaggccttattcaagcttaccatggactggacctggatcctgttcctcgtggccgctgccacaagagtccacagctttgcgtgcaagacggctaacggcaccgccattcccatcgggggaggctccgccaatgtttacgtgaacctggctcctgtggtcaatgtggggcagaaccttgttgtggatctgtctacacaaattttctgtcataatgactatccggagaccatcacagattacgtcaccctccagcggggaagcgcctatggcggggtgctgtccaacttttctggaacagttaaatacagcggctcctcttatcccttccctaccacgagcgaaacaccccgcgtggtctacaattccagaaccgacaagccttggcccgtggctctttatctgacccctgtgagctctgccggcggggtcgcgattaaagccggatccctcatcgctgttctgatcctgcggcagacaaacaattacaacagcgatgactttcagttcgtgtggaatatttacgccaacaatgatgtggtcgtgccgaccggcgggtgcgacgtttctgctcgcgatgtgacggtcacactccccgactatcctggatccgtgcccatccctctgaccgtttactgtgccaagagccaaaaccttggctattacctgtctgggacaaccgcggatgccggaaattccatttttaccaacacagctagcttctcccccgcccagggcgtgggcgtccagctcacgagaaacgggaccatcattccggctaataacacagtgtctctgggagccgtcggcaccagcgccgtgtcccttgggctgacagctaattatgcgcggaccggaggccaggttacggccgggaacgtgcaaagcatcattggagtcacatttgtgtaccagtgaggactagtccctgttcccagagcccacttttttttctttttttgaaataaaatagcctgtctttcagatctaaaaaaaaaaaaaaaaaaaaaaaaaaaaaaaaaaaaaaaaaaaaaaaaaaaaaaaaaaaaaaaaaaaaaaaaaaaaaaaaaaaaaaaaaaaaaaaaaaaa

SEQ ID NO: 1100 - RNA, 1148 nt, synthetic construct
  misc_feature 1..1148: note = Artificial____MmIgK(1-20)_Ec(J96)-FimH(22-300) mRNA opt5
  source 1..1148: mol_type = other RNA
aggagagtcccgcagtcggcgtccagcggctctgcttgttcgtgtgtgtgtcgttgcaggccttattcaagcttaccatggagaccgacacactgctcctgtgggtgcttctgctctgggtccccggcagcacggggttcgcctgcaagaccgctaacggaacagccatccctattggcgggggatccgcgaatgtttacgtgaacctggctccggtggtcaatgtgggccagaaccttgttgtggatctgtctacccaaatcttttgtcacaatgactatcccgaaacaattaccgattacgtcacactccagagagggagcgcctatggaggcgtgctgtccaacttctctggcaccgttaaatacagcgggtcctcttatccttttcccacgaccagcgagacacctcgggtggtctacaattcccgcaccgacaagccctggcctgtggccctgtatctcacaccggtgagctctgctggaggcgtcgccatcaaagctgggtccctgattgccgttcttatcctgagacagaccaacaattacaacagcgatgacttccagtttgtgtggaatatctacgcgaacaatgatgtggtcgtgcccacgggaggctgcgacgtttctgcccgggatgtgacagtcaccctccctgactatcccgggtccgtgcctattcccctgacagtttactgtgctaagagccaaaaccttggatattacctgtctggcaccaccgccgatgctggcaattccatcttcacaaacacggccagcttttccccggcgcagggggtgggagtccagctcacccgcaacggcacaattatccctgccaataacaccgtgtctctgggggctgtcggaacaagcgccgtgtccctgggcctcaccgctaattatgccagaacagggggacaggttacggccggcaacgtgcaaagcattatcggcgtcaccttcgtgtaccagtgaggactagtccctgttcccagagcccacttttttttctttttttgaaataaaatagcctgtctttcagatctaaaaaaaaaaaaaaaaaaaaaaaaaaaaaaaaaaaaaaaaaaaaaaaaaaaaaaaaaaaaaaaaaaaaaaaaaaaaaaaaaaaaaaaaaaaaaaaaaaaa

SEQ ID NO: 1101 - RNA, 1208 nt, synthetic construct
  misc_feature 1..1208: note Artificial____Ec(J96)-FimH(1-21)_Ec(J96)-FimH(22-300)_Linke r-PGDGN_Ec(J96)-FimG(24-37) mRNA opt5
  source 1..1208: mol_type = other RNA
aggagagtcccgcagtcggcgtccagcggctctgcttgttcgtgtgtgtgtcgttgcaggccttattcaagcttaccatgaagagagtgatcaccctgttcgccgtcctcctgatgggctggagcgttaacgcttggtcctttgcctgcaaaacagcgaatgggacggctattcccatcggaggcgggtctgccaacgtgtacgtgaatcttgcccctgtcgtgaacgttggacagaatctggtggtcgacctcagcacccaaattttctgtcacaacgattatccggagacaatcaccgactacgtgacactgcagcggggctccgcttatgggggagttctttctaattttagcggcaccgtgaagtactccggctctagctatcccttccctacaacctccgaaacgccccgcgtcgtgtacaacagcagaaccgataaaccttggcccgtggccctgtatctcacacctgtctcttccgctgggggagttgccattaaggcgggcagcctgatcgccgtgctgatcctccggcagaccaataactacaattctgacgattttcagttcgtgtggaacatttacgctaataacgacgtcgtggttccgacagggggatgcgatgtgtccgcccgcgacgtcaccgtgacgctgcccgattatcctggcagcgttcccatccctcttacagtgtactgtgctaaatctcaaaatctggggtattacctctccggaaccacagccgacgcgggcaacagcatttttaccaacaccgcctccttctctcccgctcagggcgtcggggtgcagctgacaagaaatggaacgatcattccggccaacaataccgtcagccttggcgctgtggggacatccgccgttagcctgggactcaccgccaactatgctcggacaggcggacaggtgaccgcggggaatgtccaatctatcattggcgtgacgtttgtttaccagcctggcgatgggaacgccgacgtgacaatcaccgtcaatggaaaggtggtggctaagtgaggactagtccctgttcccagagcccacttttttttctttttttgaaataaaatagcctgtctttcagatctaaaaaaaaaaaaaaaaaaaaaaaaaaaaaaaaaaaaaaaaaaaaaaaaaaaaaaaaaaaaaaaaaaaaaaaaaaaaaaaaaaaaaaaaaaaaaaaaaaaa

SEQ ID NO: 1102 - RNA, 1199 nt, synthetic construct
  misc_feature 1..1199: note Artificial____HsIgE(1-18)_Ec(J96)-FimH(22-300)_Linker-PGDGN _Ec(J96)-FimG(24-37) mRNA opt5
  source 1..1199: mol_type = other RNA
aggagagtcccgcagtcggcgtccagcggctctgcttgttcgtgtgtgtgtcgttgcaggccttattcaagcttaccatggactggacctggatcctgttcctcgtggccgctgccacaagagtccacagctttgcgtgcaagacggctaacggcaccgccattcccatcgggggaggctccgccaatgtttacgtgaacctggctcctgtggtcaatgtggggcagaaccttgttgtggatctgtctacacaaattttctgtcataatgactatccggagaccatcacagattacgtcaccctccagcggggaagcgcctatggcggggtgctgtccaacttttctggaacagttaaatacagcggctcctcttatcccttccctaccacgagcgaaacaccccgcgtggtctacaattccagaaccgacaagccttggcccgtggctctttatctgacccctgtgagctctgccggcggggtcgcgattaaagccggatccctcatcgctgttctgatcctgcggcagacaaacaattacaacagcgatgactttcagttcgtgtggaatatttacgccaacaatgatgtggtcgtgccgaccggcgggtgcgacgtttctgctcgcgatgtgacggtcacactccccgactatcctggatccgtgcccatccctctgaccgtttactgtgccaagagccaaaaccttggctattacctgtctgggacaaccgcggatgccggaaattccatttttaccaacacagctagcttctcccccgcccagggcgtgggcgtccagctcacgagaaacgggaccatcattccggctaataacacagtgtctctgggagccgtcggcaccagcgccgtgtcccttgggctgacagctaattatgcgcggaccggaggccaggttacggccgggaacgtgcaaagcatcattggagtcacatttgtgtaccagcctggcgacggcaatgctgatgttaccatcaccgtgaacgggaaagtcgtggccaagtgaggactagtccctgttcccagagcccacttttttttctttttttgaaataaaatagcctgtctttcagatctaaaaaaaaaaaaaaaaaaaaaaaaaaaaaaaaaaaaaaaaaaaaaaaaaaaaaaaaaaaaaaaaaaaaaaaaaaaaaaaaaaaaaaaaaaaaaaaaaaaa

SEQ ID NO: 1103 - RNA, 1205 nt, synthetic construct
  misc_feature 1..1205: note Artificial____HsIgE(1-18)_Ec(J96)-FimH(22-300)_Linker-G4SGG _Ec(J96)-FimG(24-37) mRNA opt5
  source 1..1205: mol_type = other RNA
aggagagtcccgcagtcggcgtccagcggctctgcttgttcgtgtgtgtgtcgttgcaggccttattcaagcttaccatggactggacctggatcctgttcctcgtggccgctgccacaagagtccacagctttgcgtgcaagacggctaacggcaccgccattcccatcgggggaggctccgccaatgtttacgtgaacctggctcctgtggtcaatgtggggcagaaccttgttgtggatctgtctacacaaattttctgtcataatgactatccggagaccatcacagattacgtcaccctccagcggggaagcgcctatggcggggtgctgtccaacttttctggaacagttaaatacagcggctcctcttatcccttccctaccacgagcgaaacaccccgcgtggtctacaattccagaaccgacaagccttggcccgtggctctttatctgacccctgtgagctctgccggcggggtcgcgattaaagccggatccctcatcgctgttctgatcctgcggcagacaaacaattacaacagcgatgactttcagttcgtgtggaatatttacgccaacaatgatgtggtcgtgccgaccggcgggtgcgacgtttctgctcgcgatgtgacggtcacactccccgactatcctggatccgtgcccatccctctgaccgtttactgtgccaagagccaaaaccttggctattacctgtctgggacaaccgcggatgccggaaattccatttttaccaacacagctagcttctcccccgcccagggcgtgggcgtccagctcacgagaaacgggaccatcattccggctaataacacagtgtctctgggagccgtcggcaccagcgccgtgtcccttgggctgacagctaattatgcgcggaccggaggccaggttacggccgggaacgtgcaaagcatcattggagtcacatttgtgtaccagggcggcgggggatctggcggggctgacgttaccatcaccgtgaatggaaaagtcgtggccaagtgaggactagtccctgttcccagagcccacttttttttctttttttgaaataaaatagcctgtctttcagatctaaaaaaaaaaaaaaaaaaaaaaaaaaaaaaaaaaaaaaaaaaaaaaaaaaaaaaaaaaaaaaaaaaaaaaaaaaaaaaaaaaaaaaaaaaaaaaaaaaaa

SEQ ID NO: 1104 - RNA, 1205 nt, synthetic construct
  misc_feature 1..1205: note Artificial____MmIgK(1-20)_Ec(J96)-FimH(22-300)_Linker-PGDGN _Ec(J96)-FimG(24-37) mRNA opt5
  source 1..1205: mol_type = other RNA
aggagagtcccgcagtcggcgtccagcggctctgcttgttcgtgtgtgtgtcgttgcaggccttattcaagcttaccatggagaccgacacactgctcctgtgggtgcttctgctctgggtccccggcagcacggggttcgcctgcaagaccgctaacggaacagccatccctattggcgggggatccgcgaatgtttacgtgaacctggctccggtggtcaatgtgggccagaaccttgttgtggatctgtctacccaaatcttttgtcacaatgactatcccgaaacaattaccgattacgtcacactccagagagggagcgcctatggaggcgtgctgtccaacttctctggcaccgttaaatacagcgggtcctcttatccttttcccacgaccagcgagacacctcgggtggtctacaattcccgcaccgacaagccctggcctgtggccctgtatctcacaccggtgagctctgctggaggcgtcgccatcaaagctgggtccctgattgccgttcttatcctgagacagaccaacaattacaacagcgatgacttccagtttgtgtggaatatctacgcgaacaatgatgtggtcgtgcccacgggaggctgcgacgtttctgcccgggatgtgacagtcaccctccctgactatcccgggtccgtgcctattcccctgacagtttactgtgctaagagccaaaaccttggatattacctgtctggcaccaccgccgatgctggcaattccatcttcacaaacacggccagcttttccccggcgcagggggtgggagtccagctcacccgcaacggcacaattatccctgccaataacaccgtgtctctgggggctgtcggaacaagcgccgtgtccctgggcctcaccgctaattatgccagaacagggggacaggttacggccggcaacgtgcaaagcattatcggcgtcaccttcgtgtaccagcccggggacggaaatgctgatgttaccattacagtgaacggcaaagtcgtggcgaagtgaggactagtccctgttcccagagcccacttttttttctttttttgaaataaaatagcctgtctttcagatctaaaaaaaaaaaaaaaaaaaaaaaaaaaaaaaaaaaaaaaaaaaaaaaaaaaaaaaaaaaaaaaaaaaaaaaaaaaaaaaaaaaaaaaaaaaaaaaaaaaa

SEQ ID NO: 1105 - RNA, 1205 nt, synthetic construct
  misc_feature 1..1205: note Artificial____MmIgK(1-20)_Ec(536)-FimH(22-300)_Linker-PGDGN _Ec(J96)-FimG(24-37) mRNA opt5
  source 1..1205: mol_type = other RNA
aggagagtcccgcagtcggcgtccagcggctctgcttgttcgtgtgtgtgtcgttgcaggccttattcaagcttaccatggagaccgacacactgctcctgtgggtgcttctgctctgggtccccggcagcacggggttcgcctgcaagaccgctaacggaacagccatccctattggcgggggatccgcgaatgtttacgtgaacctggctccggccgtgaatgtcggccagaaccttgtggttgatctgtctacccaaatcttttgtcacaatgactatcccgaaacaattaccgattacgtgacactccagagagggagcgcctatggaggcgtcctgtcctctttcagcggcaccgtgaaatacaacgggtcctcttatccttttcccacgaccagcgagacacctcgggttgtgtacaattcccgcaccgacaagccctggcctgtcgctctgtatctcacaccggtgagctctgccggaggcgtggctatcaaagccgggtccctgattgcggtccttatcctgagacagaccaacaattacaacagcgatgacttccagtttgtttggaatatctacgccaacaatgatgtggtggtccccacgggaggctgcgacgtgtctgctcgggatgttacagtgaccctccctgactatcccgggtccgtccctattcccctgacagtgtactgtgccaagagccaaaaccttggatattacctgtctggcaccaccgctgatgccggcaattccatcttcacaaacacggcgagcttttccccggcccagggggttggagtgcagctcacccgcaacggcacaattatccctgctaataacaccgtctctctgggggccgtgggaacaagcgctgtctccctgggcctcaccgccaattatgccagaacagggggacaggtgacggctggcaacgttcaaagcattatcggcgtgaccttcgtctaccagcccggggacggaaatgcggatgtgaccattacagttaacggcaaagtggtcgccaagtgaggactagtccctgttcccagagcccacttttttttctttttttgaaataaaatagcctgtctttcagatctaaaaaaaaaaaaaaaaaaaaaaaaaaaaaaaaaaaaaaaaaaaaaaaaaaaaaaaaaaaaaaaaaaaaaaaaaaaaaaaaaaaaaaaaaaaaaaaaaaaa

SEQ ID NO: 1106 - RNA, 1229 nt, synthetic construct
  misc_feature 1..1229: note Artificial____HsIgE(1-18)_Ec(J96)-FimH(22-300)_Linker-(G4S) 3_Ec(J96)-FimC(135-148) mRNA opt5
  source 1..1229: mol_type = other RNA
aggagagtcccgcagtcggcgtccagcggctctgcttgttcgtgtgtgtgtcgttgcaggccttattcaagcttaccatggactggacctggatcctgttcctcgtggccgctgccacaagagtccacagctttgcgtgcaagacggctaacggcaccgccattcccatcgggggaggctccgccaatgtttacgtgaacctggctcctgtggtcaatgtggggcagaaccttgttgtggatctgtctacacaaattttctgtcataatgactatccggagaccatcacagattacgtcaccctccagcggggaagcgcctatggcggggtgctgtccaacttttctggaacagttaaatacagcggctcctcttatcccttccctaccacgagcgaaacaccccgcgtggtctacaattccagaaccgacaagccttggcccgtggctctttatctgacccctgtgagctctgccggcggggtcgcgattaaagccggatccctcatcgctgttctgatcctgcggcagacaaacaattacaacagcgatgactttcagttcgtgtggaatatttacgccaacaatgatgtggtcgtgccgaccggcgggtgcgacgtttctgctcgcgatgtgacggtcacactccccgactatcctggatccgtgcccatccctctgaccgtttactgtgccaagagccaaaaccttggctattacctgtctgggacaaccgcggatgccggaaattccatttttaccaacacagctagcttctcccccgcccagggcgtgggcgtccagctcacgagaaacgggaccatcattccggctaataacacagtgtctctgggagccgtcggcaccagcgccgtgtcccttgggctgacagctaattatgcgcggaccggaggccaggttacggccgggaacgtgcaaagcatcattggagtcacatttgtgtaccagggcggcgggggatctggcgggggaggctccgggggcggaggcagcaccgagaataccctccagctggctatcatctctcgcattaaatgaggactagtccctgttcccagagcccacttttttttctttttttgaaataaaatagcctgtctttcagatctaaaaaaaaaaaaaaaaaaaaaaaaaaaaaaaaaaaaaaaaaaaaaaaaaaaaaaaaaaaaaaaaaaaaaaaaaaaaaaaaaaaaaaaaaaaaaaaaaaaa

SEQ ID NO: 1107 - RNA, 1652 nt, synthetic construct
  misc_feature 1..1652: note Artificial____LumSynth(1-154_C37A_N102D)_Linker(GGS)4-GGG_E c(J96)-FimH(22-300)_Linker-PGDGN_Ec(J96)-FimG(24-37) mRNA opt5
  source 1..1652: mol_type = other RNA
aggagagtcccgcagtcggcgtccagcggctctgcttgttcgtgtgtgtgtcgttgcaggccttattcaagcttaccatgcagatctacgagggcaagctgaccgccgaagggctcagattcggaattgtggctagccggtttaaccacgccctggtcgaccgccttgttgagggcgcgatcgatgctattgtgagacatgggggacgggaagaggacatcacactggtgcgcgtccccggctcctgggaaattcctgtggccgccggggagctcgctagaaaagaggatatcgacgccgttatcgctattggagtgctgatccggggcgccacgccgcacttcgattatattgcgtctgaagtcagcaagggccttgccgacctgtccctcgagctgcgcaaacccatcacctttggggtgattacagctgataccctggaacaagccatcgagagagctggaacaaagcatggcaataaagggtgggaggccgcgctctctgccattgaaatggctaacctgttcaagagccttcggggaggctccgggggatctggcggcagcgggggatccggcgggggatttgcctgcaagaccgctaatggcacagccatccctatcgggggaggcagcgccaacgtttacgtgaatctggctcccgtcgtgaacgtgggccagaatctcgtcgttgacctgtctacccagattttctgtcacaacgattatcctgagacgatcaccgactacgtgacacttcagcgcgggtccgcgtatggaggcgtgctgagcaatttttctgggaccgtcaaatactccggaagctcttatcccttccctacaacctccgaaacgccgagagtggtttacaacagccggacagataagccctggcctgtggccctctacctgacccccgtctcctctgctggcggggtggccattaaagccggcagcctgatcgctgttctcattctgcgccaaacaaataactataattccgacgattttcagttcgtgtggaacatctacgccaataacgacgtcgtggtccctaccggaggctgcgacgtgagcgcgagagatgttaccgtgacacttcccgactatccggggtctgtccctatccccctgacggtgtactgtgctaagtcccagaacctcggatattacctgagcggcaccacagccgatgccggaaattctatttttaccaacacagctagcttctcccctgcccagggggttggcgtgcaacttacccggaatgggacgatcattcccgctaacaatacagtctctctgggcgccgtgggaaccagcgcggtgtccctcggcctgaccgccaactatgctcgcacagggggacaggttaccgccggcaatgtccagagcatcattggggtgacatttgtgtaccagcccggagacggcaacgctgatgtcacgatcaccgtgaatgggaaagttgtggccaagtgaggactagtccctgttcccagagcccacttttttttctttttttgaaataaaatagcctgtctttcagatctaaaaaaaaaaaaaaaaaaaaaaaaaaaaaaaaaaaaaaaaaaaaaaaaaaaaaaaaaaaaaaaaaaaaaaaaaaaaaaaaaaaaaaaaaaaaaaaaaaaa

SEQ ID NO: 1108 - RNA, 1670 nt, synthetic construct
  misc_feature 1..1670: note Artificial____HsIgE(1-18)_Ec(J96)-FimH(22-300)_Linker-PGDGN _Ec(J96)-FimG(24-37)_Linker-SGG_LumSynth(1-154_C37A_N102D) mRNA opt5
  source 1..1670: mol_type = other RNA
aggagagtcccgcagtcggcgtccagcggctctgcttgttcgtgtgtgtgtcgttgcaggccttattcaagcttaccatggactggacctggatcctgttcctcgtggccgctgccacaagagtccacagctttgcgtgcaagacggctaacggcaccgccattcccatcgggggaggctccgccaatgtttacgtgaacctggctcctgtggtcaatgtggggcagaaccttgttgtggatctgtctacacaaattttctgtcataatgactatccggagaccatcacagattacgtcaccctccagcggggaagcgcctatggcggggtgctgtccaacttttctggaacagttaaatacagcggctcctcttatcccttccctaccacgagcgaaacaccccgcgtggtctacaattccagaaccgacaagccttggcccgtggctctttatctgacccctgtgagctctgccggcggggtcgcgattaaagccggatccctcatcgctgttctgatcctgcggcagacaaacaattacaacagcgatgactttcagttcgtgtggaatatttacgccaacaatgatgtggtcgtgccgaccggcgggtgcgacgtttctgctcgcgatgtgacggtcacactccccgactatcctggatccgtgcccatccctctgaccgtttactgtgccaagagccaaaaccttggctattacctgtctgggacaaccgcggatgccggaaattccatttttaccaacacagctagcttctcccccgcccagggcgtgggcgtccagctcacgagaaacgggaccatcattccggctaataacacagtgtctctgggagccgtcggcaccagcgccgtgtcccttgggctgacagctaattatgcgcggaccggaggccaggttacggccgggaacgtgcaaagcatcattggagtcacatttgtgtaccagcctggcgacggcaatgctgatgttaccatcaccgtgaacgggaaagtcgtggccaagtctggaggcatgcagatctatgaggggaagctcacagccgaaggactgcgcttcggcattgtggcttccagatttaatcacgccctggttgaccggctcgtcgagggggcgatcgacgctattgtgcgccatggcggaagagaagaggatatcaccctggtgcgggtccccggcagctgggagattcctgtggccgccggggaacttgctcgcaaagaggacatcgatgccgttatcgctattggagtgctgatcagaggcgccacaccccacttcgactacattgcgtctgaagtcagcaaggggctcgccgatctgtcccttgagctgcggaaacccatcacgtttggagtgattaccgctgacacactcgagcaggccatcgaacgcgctggcaccaagcatgggaacaaaggctgggaggccgcgctgtctgccatcgaaatggctaatctgttcaagagcctcagatgaggactagtccctgttcccagagcccacttttttttctttttttgaaataaaatagcctgtctttcagatctaaaaaaaaaaaaaaaaaaaaaaaaaaaaaaaaaaaaaaaaaaaaaaaaaaaaaaaaaaaaaaaaaaaaaaaaaaaaaaaaaaaaaaaaaaaaaaaaaaaa

SEQ ID NO: 1109 - RNA, 1697 nt, synthetic construct
  misc_feature 1..1697: note Artificial____HsIgE(1-18)_Ec(J96)-FimH(22-300)_Linker-PGDGN _Ec(J96)-FimG(24-37)_Linker-SGG_Ferritin(5-167_N19Q) mRNA opt5
  source 1..1697: mol_type = other RNA
aggagagtcccgcagtcggcgtccagcggctctgcttgttcgtgtgtgtgtcgttgcaggccttattcaagcttaccatggactggacctggatcctgttcctcgtggccgctgccacaagagtccacagctttgcgtgcaagacggctaacggcaccgccattcccatcgggggaggctccgccaatgtttacgtgaacctggctcctgtggtcaatgtggggcagaaccttgttgtggatctgtctacacaaattttctgtcataatgactatccggagaccatcacagattacgtcaccctccagcggggaagcgcctatggcggggtgctgtccaacttttctggaacagttaaatacagcggctcctcttatcccttccctaccacgagcgaaacaccccgcgtggtctacaattccagaaccgacaagccttggcccgtggctctttatctgacccctgtgagctctgccggcggggtcgcgattaaagccggatccctcatcgctgttctgatcctgcggcagacaaacaattacaacagcgatgactttcagttcgtgtggaatatttacgccaacaatgatgtggtcgtgccgaccggcgggtgcgacgtttctgctcgcgatgtgacggtcacactccccgactatcctggatccgtgcccatccctctgaccgtttactgtgccaagagccaaaaccttggctattacctgtctgggacaaccgcggatgccggaaattccatttttaccaacacagctagcttctcccccgcccagggcgtgggcgtccagctcacgagaaacgggaccatcattccggctaataacacagtgtctctgggagccgtcggcaccagcgccgtgtcccttgggctgacagctaattatgcgcggaccggaggccaggttacggccgggaacgtgcaaagcatcattggagtcacatttgtgtaccagcctggcgacggcaatgctgatgttaccatcaccgtgaacgggaaagtcgtggccaagtctggaggcgacatcattaagctcctgaatgaacaggtgaacaaagagatgcagtccagcaatctgtatatgtctatgagctcctggtgctacacacactctctcgacggggccggactgttcctttttgatcatgctgccgaggaatacgagcacgcgaagaaactgatcattttcctcaacgagaataacgttcccgtccaactgaccagcatctccgctcctgaacataagtttgagggccttacacagattttccagaaagcctatgaacacgagcaacacatcagcgagtctatcaataacattgtggaccatgccatcaagtccaaggatcacgctacgttcaattttctgcagtggtacgtggccgaacagcatgaggaagaggtcctcttcaaagacattctggataagatcgaactgattgggaacgagaaccacggcctctatctggctgaccagtacgtgaaaggaatcgccaagagccgcaaatcttgaggactagtccctgttcccagagcccacttttttttctttttttgaaataaaatagcctgtctttcagatctaaaaaaaaaaaaaaaaaaaaaaaaaaaaaaaaaaaaaaaaaaaaaaaaaaaaaaaaaaaaaaaaaaaaaaaaaaaaaaaaaaaaaaaaaaaaaaaaaaaa

SEQ ID NO: 1110 - RNA, 1727 nt, synthetic construct
  misc_feature 1..1727: note Artificial____MmIgK(1-20)_Ec(J96)-FimH(22-300)_Linker-PGDGN _Ec(J96)-FimG(24-37)_Linker-(GGS)4_Ferritin(5-166) mRNA opt5
  source 1..1727: mol_type = other RNA
aggagagtcccgcagtcggcgtccagcggctctgcttgttcgtgtgtgtgtcgttgcaggccttattcaagcttaccatggagaccgacacactgctcctgtgggtgcttctgctctgggtccccggcagcacggggttcgcctgcaagaccgctaacggaacagccatccctattggcgggggatccgcgaatgtttacgtgaacctggctccggtggtcaatgtgggccagaaccttgttgtggatctgtctacccaaatcttttgtcacaatgactatcccgaaacaattaccgattacgtcacactccagagagggagcgcctatggaggcgtgctgtccaacttctctggcaccgttaaatacagcgggtcctcttatccttttcccacgaccagcgagacacctcgggtggtctacaattcccgcaccgacaagccctggcctgtggccctgtatctcacaccggtgagctctgctggaggcgtcgccatcaaagctgggtccctgattgccgttcttatcctgagacagaccaacaattacaacagcgatgacttccagtttgtgtggaatatctacgcgaacaatgatgtggtcgtgcccacgggaggctgcgacgtttctgcccgggatgtgacagtcaccctccctgactatcccgggtccgtgcctattcccctgacagtttactgtgctaagagccaaaaccttggatattacctgtctggcaccaccgccgatgctggcaattccatcttcacaaacacggccagcttttccccggcgcagggggtgggagtccagctcacccgcaacggcacaattatccctgccaataacaccgtgtctctgggggctgtcggaacaagcgccgtgtccctgggcctcaccgctaattatgccagaacagggggacaggttacggccggcaacgtgcaaagcattatcggcgtcaccttcgtgtaccagcccggggacggaaatgctgatgttaccattacagtgaacggcaaagtcgtggcgaaagggggatctggcgggtccggcggaagcggcgggtctgacatcatcaagctgcttaatgaacaggtgaacaaggagatgaatagctccaacctgtatatgtctatgagctcctggtgctacacccatagcctcgacggagccggcctgtttcttttcgatcacgctgccgaagagtacgagcatgccaagaaactgattatctttctcaatgaaaacaatgttcctgtccagctgacatctatttccgctcccgagcacaagttcgaagggctgacgcaaatctttcagaaagcctatgagcatgagcagcacattagcgaatctatcaacaatatcgtggaccacgcgattaagtccaaggatcatgctaccttcaacttcctccaatggtacgtggccgagcagcacgaagaggaagtcctgtttaaagacatccttgataagattgagctgatcggaaacgagaatcatggcctctatctggccgaccagtacgtgaaagggattgctaagagccggaaatgaggactagtccctgttcccagagcccacttttttttctttttttgaaataaaatagcctgtctttcagatctaaaaaaaaaaaaaaaaaaaaaaaaaaaaaaaaaaaaaaaaaaaaaaaaaaaaaaaaaaaaaaaaaaaaaaaaaaaaaaaaaaaaaaaaaaaaaaaaaaaa

SEQ ID NO: 1111 - RNA, 1370 nt, synthetic construct
  misc_feature 1..1370: note Artificial____HsIgE(1-18)_Ec(J96)-FimH(22-300)_Linker-PGDGN _Ec(J96)-FimG(24-37)_TMdomain-HA(510-566) mRNA opt5
  source 1..1370: mol_type = other RNA
aggagagtcccgcagtcggcgtccagcggctctgcttgttcgtgtgtgtgtcgttgcaggccttattcaagcttaccatggactggacctggatcctgttcctcgtggccgctgccacaagagtccacagctttgcgtgcaagacggctaacggcaccgccattcccatcgggggaggctccgccaatgtttacgtgaacctggctcctgtggtcaatgtggggcagaaccttgttgtggatctgtctacacaaattttctgtcataatgactatccggagaccatcacagattacgtcaccctccagcggggaagcgcctatggcggggtgctgtccaacttttctggaacagttaaatacagcggctcctcttatcccttccctaccacgagcgaaacaccccgcgtggtctacaattccagaaccgacaagccttggcccgtggctctttatctgacccctgtgagctctgccggcggggtcgcgattaaagccggatccctcatcgctgttctgatcctgcggcagacaaacaattacaacagcgatgactttcagttcgtgtggaatatttacgccaacaatgatgtggtcgtgccgaccggcgggtgcgacgtttctgctcgcgatgtgacggtcacactccccgactatcctggatccgtgcccatccctctgaccgtttactgtgccaagagccaaaaccttggctattacctgtctgggacaaccgcggatgccggaaattccatttttaccaacacagctagcttctcccccgcccagggcgtgggcgtccagctcacgagaaacgggaccatcattccggctaataacacagtgtctctgggagccgtcggcaccagcgccgtgtcccttgggctgacagctaattatgcgcggaccggaggccaggttacggccgggaacgtgcaaagcatcattggagtcacatttgtgtaccagcctggcgacggcaatgctgatgttaccatcaccgtgaacgggaaagtcgtggccaaggccaagctcaatcgcgaggaaatcgacggagtgaaactggagtctacaagaatttatcagatcctggctatttactccaccgttgccagctctctcgtcctggtggtgagccttggcgcgatctccttctggatgtgctctaacgggagcctgcagtgtcggatttgcatctgaggactagtccctgttcccagagcccacttttttttctttttttgaaataaaatagcctgtctttcagatctaaaaaaaaaaaaaaaaaaaaaaaaaaaaaaaaaaaaaaaaaaaaaaaaaaaaaaaaaaaaaaaaaaaaaaaaaaaaaaaaaaaaaaaaaaaaaaaaaaaa

SEQ ID NO: 1112 - RNA, 1703 nt, synthetic construct
  misc_feature 1..1703: note Artificial____HsIgE(1-18)_LumSynth(1-154_C37A_N102D)_Linker (GGS)4-GGG_Ec(J96)-FimH(22-300)_Linker-PGDGN_Ec(J96)-FimG(2 4-37) mRNA opt5
  source 1..1703: mol_type = other RNA
aggagagtcccgcagtcggcgtccagcggctctgcttgttcgtgtgtgtgtcgttgcaggccttattcaagcttaccatggactggacctggatcctgttcctcgtggccgctgccacaagagtccacagccagatttacgagggcaagctgacggcggaagggcttcggtttggaatcgttgcttcccgcttcaaccatgccctggtggatagactcgtggagggcgccattgacgctatcgtccggcacgggggacgcgaagaggatattaccctggtgagagttcccggctcttgggaaatccctgtggccgctggggagcttgcccggaaagaggacatcgatgcggtcattgccatcggagtgctgattcgcggcgctacaccgcattttgactatatcgccagcgaagtttccaagggcctcgctgatctgtctctggagctcagaaaacccattaccttcggggtgatcacagccgacaccctggaacaagcgattgagcgggccggaacaaagcacggcaataaagggtgggaggctgcccttagcgctatcgaaatggccaacctgtttaagtccctccgcggaggctctgggggaagcggcggctccgggggaagcggcgggggattcgcctgcaagaccgctaatggcacggcgatccctattgggggaggctctgccaacgtctacgtgaatctggctcccgtggtcaacgttggccagaatcttgtggtggatctgtccacccagatcttttgtcataacgactatcctgagacaattaccgattacgtcacactccagagagggagcgcctatggaggcgtgctgtctaatttctccgggaccgttaaatacagcggatcttcctatccctttcctacgacaagcgaaaccccgcgggtggtctacaactcccgcacagacaagccctggcctgtggccctgtacctcacccccgtttctagcgctggcggggtggccatcaaagcgggctccctgattgctgtccttatcctgagacaaaccaataactataatagcgatgacttccagtttgtgtggaacatctacgccaataacgacgtcgtggttcctacaggaggctgcgatgtgtctgcccgggacgtcacggtgaccctccccgattatccggggtccgttcctattcccctgacagtgtactgtgctaagagccagaaccttggatattacctgtctggcaccacagccgacgctgggaatagcatcttcaccaacacggcctccttttctcctgcgcagggagtcggcgtgcaactcacacgcaatgggaccattatccccgccaacaataccgtgagcctgggcgctgttggaacatccgccgtcagcctgggcctcaccgctaactatgccagaacagggggacaggtgacggcgggcaatgtgcagtctattatcggggtcaccttcgtgtaccagcccggagatggcaacgccgacgttacaatcaccgtgaatgggaaagtcgtggctaagtgaggactagtccctgttcccagagcccacttttttttctttttttgaaataaaatagcctgtctttcagatctaaaaaaaaaaaaaaaaaaaaaaaaaaaaaaaaaaaaaaaaaaaaaaaaaaaaaaaaaaaaaaaaaaaaaaaaaaaaaaaaaaaaaaaaaaaaaaaaaaaa

SEQ ID NO: 1113 - RNA, 1670 nt, synthetic construct
  misc_feature 1..1670: note Artificial____HsIgE(1-18)_Ec(J96)-FimH(22-300_N28S_N91S_N24 9Q)_Linker-PGDGN_Ec(J96)-FimG(24-37)_Linker-SGG_LumSynth(1- 154_C37A_N102D) mRNA opt5
  source 1..1670: mol_type = other RNA
aggagagtcccgcagtcggcgtccagcggctctgcttgttcgtgtgtgtgtcgttgcaggccttattcaagcttaccatggactggacctggatcctgttcctcgtggccgctgccacaagagtccacagctttgcgtgcaagacggcttccggcaccgccattcccatcgggggaggctctgccaacgtttacgtgaatctggctcctgtggtcaacgtggggcagaatcttgttgtggatctgagcacacaaattttctgtcataacgactatccggagaccatcacagattacgtcaccctccagcggggatccgcctatggcggggtgctgtctagcttttccggaacagttaaatactctggcagctcctatcccttccctaccacgagcgaaacaccccgcgtggtctacaattctagaaccgacaagccttggcccgtggctctttatctgacccctgtgtccagcgccggcggggtcgcgattaaagccggatctctcatcgctgttctgatcctgcggcagacaaacaattacaactccgatgactttcagttcgtgtggaatatttacgccaacaatgatgtggtcgtgccgaccggcgggtgcgacgttagcgctcgcgatgtgacggtcacactccccgactatcctggatctgtgcccatccctctgaccgtttactgtgccaagtcccaaaaccttggctattacctgagcgggacaaccgcggatgccggaaattccatttttaccaacacagcttctttcagccccgcccagggcgtgggcgtccagctcacgagacaggggaccatcattccggctaataacacagtgtccctgggagccgtcggcaccagcgccgtgtctcttgggctgacagctaactatgcgcggaccggaggccaagttacggccgggaatgtgcagtccatcattggagtcacatttgtgtaccagcctggcgacggcaacgctgatgttaccatcaccgtgaatgggaaagtcgtggccaagagcggaggcatgcagatctatgaggggaagctcacagccgaaggactgcgcttcggcattgtggcttctagatttaaccacgccctggttgaccggctcgtcgagggggcgatcgacgctattgtgcgccatggcggaagagaagaggatatcaccctggtgcgggtccccggcagctgggagattcctgtggccgccggggaacttgctcgcaaagaggacatcgatgccgttatcgctattggagtgctgatcagaggcgccacaccccacttcgactacattgcgtccgaagtctctaaggggctcgccgatctgagccttgagctgcggaaacccatcacgtttggagtgattaccgctgacacactcgagcaagccatcgaacgcgctggcaccaagcatgggaataaaggctgggaggccgcgctgtccgccatcgaaatggctaacctgttcaagagcctcagatgaggactagtccctgttcccagagcccacttttttttctttttttgaaataaaatagcctgtctttcagatctaaaaaaaaaaaaaaaaaaaaaaaaaaaaaaaaaaaaaaaaaaaaaaaaaaaaaaaaaaaaaaaaaaaaaaaaaaaaaaaaaaaaaaaaaaaaaaaaaaaa

SEQ ID NO: 1114 - RNA, 1670 nt, synthetic construct
  misc_feature 1..1670: note Artificial____HsIgE(1-18)_Ec(J96)-FimH(22-300_N28S_N91S_N24 9Q_N256D)_Linker-PGDGN_Ec(J96)-FimG(24-37)_Linker-SGG_LumSy nth(1-154_C37A_N102D) mRNA opt5
  source 1..1670: mol_type = other RNA
aggagagtcccgcagtcggcgtccagcggctctgcttgttcgtgtgtgtgtcgttgcaggccttattcaagcttaccatggactggacctggatcctgttcctcgtggccgctgccacaagagtccacagctttgcgtgcaagacggcttccggcaccgccattcccatcgggggaggctctgccaacgtttacgtgaatctggctcctgtggtcaacgtggggcagaatcttgttgtggatctgagcacacaaattttctgtcataacgactatccggagaccatcacagattacgtcaccctccagcggggatccgcctatggcggggtgctgtctagcttttccggaacagttaaatactctggcagctcctatcccttccctaccacgagcgaaacaccccgcgtggtctacaattctagaaccgacaagccttggcccgtggctctttatctgacccctgtgtccagcgccggcggggtcgcgattaaagccggatctctcatcgctgttctgatcctgcggcagacaaacaattacaactccgatgactttcagttcgtgtggaatatttacgccaacaatgatgtggtcgtgccgaccggcgggtgcgacgttagcgctcgcgatgtgacggtcacactccccgactatcctggatctgtgcccatccctctgaccgtttactgtgccaagtcccaaaaccttggctattacctgagcgggacaaccgcggatgccggaaattccatttttaccaacacagcttctttcagccccgcccagggcgtgggcgtccagctcacgagacaggggaccatcattccggctgacaatacagtgtccctgggagccgtcggcaccagcgccgtgtctcttgggctgacagctaactatgcgcggaccggaggccaagttacggccgggaacgtgcagtccatcattggagtcacatttgtgtaccagcctggcgatggcaatgctgacgttaccatcaccgtgaacgggaaagtcgtggccaagagcggaggcatgcagatctatgaggggaagctcacagccgaaggactgcgcttcggcattgtggcttctagatttaatcacgccctggttgaccggctcgtcgagggggcgatcgatgctattgtgcgccatggcggaagagaagaggacatcaccctggtgcgggtccccggcagctgggagattcctgtggccgccggggaacttgctcgcaaagaggatatcgacgccgttatcgctattggagtgctgatcagaggcgccacaccccacttcgattacattgcgtccgaagtctctaaggggctcgccgacctgagccttgagctgcggaaacccatcacgtttggagtgattaccgctgatacactcgagcaagccatcgaacgcgctggcaccaagcatgggaacaaaggctgggaggccgcgctgtccgccatcgaaatggctaatctgttcaagagcctcagatgaggactagtccctgttcccagagcccacttttttttctttttttgaaataaaatagcctgtctttcagatctaaaaaaaaaaaaaaaaaaaaaaaaaaaaaaaaaaaaaaaaaaaaaaaaaaaaaaaaaaaaaaaaaaaaaaaaaaaaaaaaaaaaaaaaaaaaaaaaaaaa

SEQ ID NO: 1115 - RNA, 1670 nt, synthetic construct
  misc_feature 1..1670: note Artificial____HsIgE(1-18)_Ec(J96)-FimH(22-300_N28S_V48C_L55 C_N91S_N249Q)_Linker-PGDGN_Ec(J96)-FimG(24-37)_Linker-SGG_L umSynth(1-154_C37A_N102D) mRNA opt5
  source 1..1670: mol_type = other RNA
aggagagtcccgcagtcggcgtccagcggctctgcttgttcgtgtgtgtgtcgttgcaggccttattcaagcttaccatggactggacctggatcctgttcctcgtggccgctgccacaagagtccacagctttgcgtgcaagacggcttccggcaccgccattcccatcgggggaggctctgccaacgtttacgtgaatctggctccttgtgtgaacgtcgggcagaattgcgtggttgatcttagcacacaaattttctgtcataacgactatccggagaccatcacagattacgtgaccctgcagcggggatccgcctatggcggggtcctctctagcttttccggaacagtgaaatactctggcagctcctatcccttccctaccacgagcgaaacaccccgcgttgtgtacaattctagaaccgacaagccttggcccgtcgctctgtatcttacccctgtgtccagcgccggcggggtggcgattaaagccggatctctgatcgctgtcctcatcctgcggcagacaaacaattacaactccgatgactttcagttcgtttggaatatttacgccaacaatgatgtggtggtcccgaccggcgggtgcgacgtgagcgctcgcgatgttacggtgacactgcccgactatcctggatctgtccccatccctctcaccgtgtactgtgccaagtcccaaaacctgggctattaccttagcgggacaaccgcggatgccggaaattccatttttaccaacacagcttctttcagccccgcccagggcgttggcgtgcagctgacgagacaggggaccatcattccggctaataacacagtctccctcggagccgtgggcaccagcgccgtctctctggggcttacagctaactatgcgcggaccggaggccaagtgacggccgggaatgttcagtccatcattggagtgacatttgtctaccagcctggcgacggcaacgctgatgtgaccatcaccgttaatgggaaagtggtcgccaagagcggaggcatgcagatctatgaggggaagctgacagccgaaggactccgcttcggcattgtggcttctagatttaaccacgccctggtggaccggctggttgagggggcgatcgacgctattgtccgccatggcggaagagaagaggatatcaccctcgtgcgggtgcccggcagctgggagattcctgtcgccgccggggaactggctcgcaaagaggacatcgatgccgtgatcgctattggagttcttatcagaggcgccacaccccacttcgactacattgcgtccgaagtgtctaaggggctggccgatctcagcctggagcttcggaaacccatcacgtttggagtcattaccgctgacacactggagcaagccatcgaacgcgctggcaccaagcatgggaataaaggctgggaggccgcgctctccgccatcgaaatggctaacctgttcaagagcctgagatgaggactagtccctgttcccagagcccacttttttttctttttttgaaataaaatagcctgtctttcagatctaaaaaaaaaaaaaaaaaaaaaaaaaaaaaaaaaaaaaaaaaaaaaaaaaaaaaaaaaaaaaaaaaaaaaaaaaaaaaaaaaaaaaaaaaaaaaaaaaaaa

SEQ ID NO: 1116 - RNA, 1670 nt, synthetic construct
  misc_feature 1..1670: note Artificial____HsIgE(1-18)_Ec(J96)-FimH(22-300_F165V)_Linker -PGDGN_Ec(J96)-FimG(24-37)_Linker-SGG_LumSynth(1-154_C37A_N 102D) mRNA opt5
  source 1..1670: mol_type = other RNA
aggagagtcccgcagtcggcgtccagcggctctgcttgttcgtgtgtgtgtcgttgcaggccttattcaagcttaccatggactggacctggatcctgttcctcgtggccgctgccacaagagtccacagctttgcgtgcaagacggctaacggcaccgccattcccatcgggggaggctccgccaatgtttacgtgaacctggctcctgtggtcaatgtggggcagaaccttgttgtggatctgtctacacaaattttctgtcataatgactatccggagaccatcacagattacgtcaccctccagcggggaagcgcctatggcggggtgctgtccaacttttctggaacagttaaatacagcggctcctcttatcccttccctaccacgagcgaaacaccccgcgtggtctacaattccagaaccgacaagccttggcccgtggctctttatctgacccctgtgagctctgccggcggggtcgcgattaaagccggatccctcatcgctgttctgatcctgcggcagacaaacaattacaacagcgatgactttcaggtggtgtggaatatttacgccaacaatgatgtcgtggttccgaccggcgggtgcgacgtgtctgctcgcgatgtcacggtgacactccccgactatcctggatccgttcccatccctctgaccgtgtactgtgccaagagccaaaaccttggctattacctgtctgggacaaccgcggatgccggaaattccattttcaccaacacagctagcttttcccccgcccagggcgtcggcgtgcagctcacgagaaacgggaccatcattccggctaataacacagtctctctgggagccgtgggcaccagcgccgtttcccttgggctgacagctaattatgcgcggaccggaggccaggtgacggccgggaacgtccaaagcatcattggagtgacattcgtttaccagcctggcgacggcaatgctgatgtgaccatcaccgtcaacgggaaagtggtggccaagtctggaggcatgcagatctatgaggggaagctcacagccgaaggactgcgctttggcattgttgcttccagattcaatcacgccctggtcgaccggctcgtggagggggcgatcgacgctattgtgcgccatggcggaagagaagaggatatcaccctggtccgggtgcccggcagctgggagattcctgttgccgccggggaacttgctcgcaaagaggacatcgatgccgtgatcgctattggagtcctgatcagaggcgccacaccccactttgactacattgcgtctgaagtgagcaaggggctcgccgatctgtcccttgagctgcggaaacccatcacgttcggagttattaccgctgacacactcgagcaggccatcgaacgcgctggcaccaagcatgggaacaaaggctgggaggccgcgctgtctgccatcgaaatggctaatctgtttaagagcctcagatgaggactagtccctgttcccagagcccacttttttttctttttttgaaataaaatagcctgtctttcagatctaaaaaaaaaaaaaaaaaaaaaaaaaaaaaaaaaaaaaaaaaaaaaaaaaaaaaaaaaaaaaaaaaaaaaaaaaaaaaaaaaaaaaaaaaaaaaaaaaaaa

SEQ ID NO: 1117 - RNA, 1697 nt, synthetic construct
  misc_feature 1..1697: note Artificial____HsIgE(1-18)_Ec(J96)-FimH(22-300_N28S_N91S_N24 9Q)_Linker-PGDGN_Ec(J96)-FimG(24-37)_Linker-SGG_Ferritin(5- 167_N19Q) mRNA opt5
  source 1..1697: mol_type = other RNA
aggagagtcccgcagtcggcgtccagcggctctgcttgttcgtgtgtgtgtcgttgcaggccttattcaagcttaccatggactggacctggatcctgttcctcgtggccgctgccacaagagtccacagctttgcgtgcaagacggcttccggcaccgccattcccatcgggggaggctctgccaacgtttacgtgaatctggctcctgtggtcaacgtggggcagaatcttgttgtggatctgagcacacaaattttctgtcataacgactatccggagaccatcacagattacgtcaccctccagcggggatccgcctatggcggggtgctgtctagcttttccggaacagttaaatactctggcagctcctatcccttccctaccacgagcgaaacaccccgcgtggtctacaattctagaaccgacaagccttggcccgtggctctttatctgacccctgtgtccagcgccggcggggtcgcgattaaagccggatctctcatcgctgttctgatcctgcggcagacaaacaattacaactccgatgactttcagttcgtgtggaatatttacgccaacaatgatgtggtcgtgccgaccggcgggtgcgacgttagcgctcgcgatgtgacggtcacactccccgactatcctggatctgtgcccatccctctgaccgtttactgtgccaagtcccaaaaccttggctattacctgagcgggacaaccgcggatgccggaaattccatttttaccaacacagcttctttcagccccgcccagggcgtgggcgtccagctcacgagacaggggaccatcattccggctaataacacagtgtccctgggagccgtcggcaccagcgccgtgtctcttgggctgacagctaactatgcgcggaccggaggccaagttacggccgggaatgtgcagtccatcattggagtcacatttgtgtaccagcctggcgacggcaacgctgatgttaccatcaccgtgaatgggaaagtcgtggccaagagcggaggcgacatcattaagctcctgaacgaacaggtgaataaagagatgcaatctagcaacctgtatatgtccatgtctagctggtgctacacacactccctcgacggggccggactgttcctttttgatcatgctgccgaggaatacgagcacgcgaagaaactgatcattttcctcaatgagaacaatgttcccgtccagctgaccagcatctctgctcctgaacataagtttgagggccttacacagattttccaaaaagcctatgaacacgagcagcacatctccgagagcatcaacaatattgtggaccatgccatcaagtctaaggatcacgctacgttcaactttctgcagtggtacgtggccgaacagcatgaggaagaggtcctcttcaaagacattctggataagatcgaactgattgggaatgagaaccacggcctctatctggctgaccaatacgtgaaaggaatcgccaagtcccgcaaaagctgaggactagtccctgttcccagagcccacttttttttctttttttgaaataaaatagcctgtctttcagatctaaaaaaaaaaaaaaaaaaaaaaaaaaaaaaaaaaaaaaaaaaaaaaaaaaaaaaaaaaaaaaaaaaaaaaaaaaaaaaaaaaaaaaaaaaaaaaaaaaaa

SEQ ID NO: 1118 - RNA, 1697 nt, synthetic construct
  misc_feature 1..1697: note Artificial____HsIgE(1-18)_Ec(J96)-FimH(22-300_N28S_N91S_N24 9Q_N256D)_Linker-PGDGN_Ec(J96)-FimG(24-37)_Linker-SGG_Ferri tin(5-167_N19Q) mRNA opt5
  source 1..1697: mol_type = other RNA
aggagagtcccgcagtcggcgtccagcggctctgcttgttcgtgtgtgtgtcgttgcaggccttattcaagcttaccatggactggacctggatcctgttcctcgtggccgctgccacaagagtccacagctttgcgtgcaagacggcttccggcaccgccattcccatcgggggaggctctgccaacgtttacgtgaatctggctcctgtggtcaacgtggggcagaatcttgttgtggatctgagcacacaaattttctgtcataacgactatccggagaccatcacagattacgtcaccctccagcggggatccgcctatggcggggtgctgtctagcttttccggaacagttaaatactctggcagctcctatcccttccctaccacgagcgaaacaccccgcgtggtctacaattctagaaccgacaagccttggcccgtggctctttatctgacccctgtgtccagcgccggcggggtcgcgattaaagccggatctctcatcgctgttctgatcctgcggcagacaaacaattacaactccgatgactttcagttcgtgtggaatatttacgccaacaatgatgtggtcgtgccgaccggcgggtgcgacgttagcgctcgcgatgtgacggtcacactccccgactatcctggatctgtgcccatccctctgaccgtttactgtgccaagtcccaaaaccttggctattacctgagcgggacaaccgcggatgccggaaattccatttttaccaacacagcttctttcagccccgcccagggcgtgggcgtccagctcacgagacaggggaccatcattccggctgacaatacagtgtccctgggagccgtcggcaccagcgccgtgtctcttgggctgacagctaactatgcgcggaccggaggccaagttacggccgggaacgtgcagtccatcattggagtcacatttgtgtaccagcctggcgatggcaatgctgacgttaccatcaccgtgaacgggaaagtcgtggccaagagcggaggcgacatcattaagctcctgaatgaacaggtgaacaaagagatgcaatctagcaatctgtatatgtccatgtctagctggtgctacacacactccctcgatggggccggactgttcctttttgaccatgctgccgaggaatacgagcacgcgaagaaactgatcattttcctcaacgagaataacgttcccgtccagctgaccagcatctctgctcctgaacataagtttgagggccttacacagattttccaaaaagcctatgaacacgagcagcacatctccgagagcatcaataacattgtggatcatgccatcaagtctaaggaccacgctacgttcaattttctgcagtggtacgtggccgaacagcatgaggaagaggtcctcttcaaagatattctggacaagatcgaactgattgggaacgagaatcacggcctctatctggctgatcaatacgtgaaaggaatcgccaagtcccgcaaaagctgaggactagtccctgttcccagagcccacttttttttctttttttgaaataaaatagcctgtctttcagatctaaaaaaaaaaaaaaaaaaaaaaaaaaaaaaaaaaaaaaaaaaaaaaaaaaaaaaaaaaaaaaaaaaaaaaaaaaaaaaaaaaaaaaaaaaaaaaaaaaaa

SEQ ID NO: 1119 - RNA, 1697 nt, synthetic construct
  misc_feature 1..1697: note Artificial____HsIgE(1-18)_Ec(J96)-FimH(22-300_N28S_V48C_L55 C_N91S_N249Q)_Linker-PGDGN_Ec(J96)-FimG(24-37)_Linker-SGG_F erritin(5-167_N19Q) mRNA opt5
  source 1..1697: mol_type = other RNA
aggagagtcccgcagtcggcgtccagcggctctgcttgttcgtgtgtgtgtcgttgcaggccttattcaagcttaccatggactggacctggatcctgttcctcgtggccgctgccacaagagtccacagctttgcgtgcaagacggcttccggcaccgccattcccatcgggggaggctctgccaacgtttacgtgaatctggctccttgtgtgaacgtcgggcagaattgcgtggttgatcttagcacacaaattttctgtcataacgactatccggagaccatcacagattacgtgaccctgcagcggggatccgcctatggcggggtcctctctagcttttccggaacagtgaaatactctggcagctcctatcccttccctaccacgagcgaaacaccccgcgttgtgtacaattctagaaccgacaagccttggcccgtcgctctgtatcttacccctgtgtccagcgccggcggggtggcgattaaagccggatctctgatcgctgtcctcatcctgcggcagacaaacaattacaactccgatgactttcagttcgtttggaatatttacgccaacaatgatgtggtggtcccgaccggcgggtgcgacgtgagcgctcgcgatgttacggtgacactgcccgactatcctggatctgtccccatccctctcaccgtgtactgtgccaagtcccaaaacctgggctattaccttagcgggacaaccgcggatgccggaaattccatttttaccaacacagcttctttcagccccgcccagggcgttggcgtgcagctgacgagacaggggaccatcattccggctaataacacagtctccctcggagccgtgggcaccagcgccgtctctctggggcttacagctaactatgcgcggaccggaggccaagtgacggccgggaatgttcagtccatcattggagtgacatttgtctaccagcctggcgacggcaacgctgatgtgaccatcaccgttaatgggaaagtggtcgccaagagcggaggcgacatcattaagctgctcaacgaacaggtgaataaagagatgcaatctagcaacctgtatatgtccatgtctagctggtgctacacacactccctggacggggccggactcttcctgtttgatcatgctgccgaggaatacgagcacgcgaagaaacttatcattttcctgaatgagaacaatgtgcccgttcagctcaccagcatctctgctcctgaacataagtttgagggcctgacacagattttccaaaaagcctatgaacacgagcagcacatctccgagagcatcaacaatattgtcgaccatgccatcaagtctaaggatcacgctacgttcaactttcttcagtggtacgtggccgaacagcatgaggaagaggtgctgttcaaagacattctcgataagatcgaactgattgggaatgagaaccacggcctgtatctcgctgaccaatacgtcaaaggaatcgccaagtcccgcaaaagctgaggactagtccctgttcccagagcccacttttttttctttttttgaaataaaatagcctgtctttcagatctaaaaaaaaaaaaaaaaaaaaaaaaaaaaaaaaaaaaaaaaaaaaaaaaaaaaaaaaaaaaaaaaaaaaaaaaaaaaaaaaaaaaaaaaaaaaaaaaaaaa

SEQ ID NO: 1120 - RNA, 1697 nt, synthetic construct
  misc_feature 1..1697: note Artificial____HsIgE(1-18)_Ec(J96)-FimH(22-300_F165V)_Linker -PGDGN_Ec(J96)-FimG(24-37)_Linker-SGG_Ferritin(5-167_N19Q) mRNA opt5
  source 1..1697: mol_type = other RNA
aggagagtcccgcagtcggcgtccagcggctctgcttgttcgtgtgtgtgtcgttgcaggccttattcaagcttaccatggactggacctggatcctgttcctcgtggccgctgccacaagagtccacagctttgcgtgcaagacggctaacggcaccgccattcccatcgggggaggctccgccaatgtttacgtgaacctggctcctgtggtcaatgtggggcagaaccttgttgtggatctgtctacacaaattttctgtcataatgactatccggagaccatcacagattacgtcaccctccagcggggaagcgcctatggcggggtgctgtccaacttttctggaacagttaaatacagcggctcctcttatcccttccctaccacgagcgaaacaccccgcgtggtctacaattccagaaccgacaagccttggcccgtggctctttatctgacccctgtgagctctgccggcggggtcgcgattaaagccggatccctcatcgctgttctgatcctgcggcagacaaacaattacaacagcgatgactttcaggtggtgtggaatatttacgccaacaatgatgtcgtggttccgaccggcgggtgcgacgtgtctgctcgcgatgtcacggtgacactccccgactatcctggatccgttcccatccctctgaccgtgtactgtgccaagagccaaaaccttggctattacctgtctgggacaaccgcggatgccggaaattccattttcaccaacacagctagcttttcccccgcccagggcgtcggcgtgcagctcacgagaaacgggaccatcattccggctaataacacagtctctctgggagccgtgggcaccagcgccgtttcccttgggctgacagctaattatgcgcggaccggaggccaggtgacggccgggaacgtccaaagcatcattggagtgacattcgtttaccagcctggcgacggcaatgctgatgtgaccatcaccgtcaacgggaaagtggtggccaagtctggaggcgacatcattaagctcctgaatgagcaggttaacaaagaaatgcagtccagcaatctgtatatgtctatgagctcctggtgctacacacactctctcgacggggccggactgtttcttttcgatcatgctgccgaggaatacgagcacgcgaagaaactgatcatttttctcaacgagaataacgtccccgtgcaactgaccagcatctccgctcctgaacataagttcgagggccttacacagatttttcagaaagcctatgaacacgagcaacacatcagcgagtctatcaataacattgtggaccatgccatcaagtccaaggatcacgctacgttcaatttcctgcagtggtacgtcgccgaacagcatgaggaagaggtgctctttaaagacattctggataagatcgaactgattgggaacgagaaccacggcctctatctggctgaccagtacgttaaaggaatcgccaagagccgcaaatcttgaggactagtccctgttcccagagcccacttttttttctttttttgaaataaaatagcctgtctttcagatctaaaaaaaaaaaaaaaaaaaaaaaaaaaaaaaaaaaaaaaaaaaaaaaaaaaaaaaaaaaaaaaaaaaaaaaaaaaaaaaaaaaaaaaaaaaaaaaaaaaa

SEQ ID NO: 1121 - RNA, 980 nt, synthetic construct
  misc_feature 1..980: note Artificial____Ec(J96)-FimC(1-36)_Ec(J96)-FimC(37-241) mRNA opt1
  source 1..980: mol_type = other RNA
aggagagtcccgcagtcggcgtccagcggctctgcttgttcgtgtgtgtgtcgttgcaggccttattcaagcttaccatgagcaacaagaacgtgaacgtccgcaagtcccaggagatcaccttctgcctgctcgccggcatcctgatgttcatggccatgatggtggcggggcgggccgaggccggcgtggccctgggggccacccgcgtcatctaccccgcgggccagaagcaggtccagctcgccgtgaccaacaacgacgagaacagcacgtacctgatccagtcctgggtggagaacgccgacggggtgaaggacggccggttcatcgtgaccccgcccctgttcgccatgaaggggaagaaggagaacaccctccgcatcctggacgccaccaacaaccagctgccccaggaccgggagagcctcttctggatgaacgtcaaggcgatcccctccatggacaagagcaagctgacggagaacaccctgcagctcgccatcatctcccgcatcaagctgtactaccggccggccaagctggccctcccgcccgaccaggcggccgagaagctgcgcttccggcgcagcgccaactccctgaccctcatcaaccccaccccctactacctgacggtgaccgagctgaacgccggcacccgggtgctcgagaacgccctggtcccgcccatgggcgagagcaccgtgaagctgccctccgacgcggggagcaacatcacgtaccgcaccatcaacgactacggcgccctcacccccaagatgaccggggtgatggagtgatgatgaggactagtccctgttcccagagcccacttttttttctttttttgaaataaaatagcctgtctttcagatctaaaaaaaaaaaaaaaaaaaaaaaaaaaaaaaaaaaaaaaaaaaaaaaaaaaaaaaaaaaaaaaaaaaaaaaaaaaaaaaaaaaaaaaaaaaaaaaaaaaa

SEQ ID NO: 1122 - RNA, 926 nt, synthetic construct
  misc_feature 1..926: note = Artificial____HsIgE(1-18)_Ec(J96)-FimC(37-241) mRNA opt1
  source 1..926: mol_type = other RNA
aggagagtcccgcagtcggcgtccagcggctctgcttgttcgtgtgtgtgtcgttgcaggccttattcaagcttaccatggactggacctggatcctgttcctcgtggccgccgcgacccgcgtccacagcggcgtggccctgggggccacccgcgtcatctaccccgcgggccagaagcaggtccagctcgccgtgaccaacaacgacgagaacagcacgtacctgatccagtcctgggtggagaacgccgacggggtgaaggacggccggttcatcgtgaccccgcccctgttcgccatgaaggggaagaaggagaacaccctccgcatcctggacgccaccaacaaccagctgccccaggaccgggagagcctcttctggatgaacgtcaaggcgatcccctccatggacaagagcaagctgacggagaacaccctgcagctcgccatcatctcccgcatcaagctgtactaccggccggccaagctggccctcccgcccgaccaggcggccgagaagctgcgcttccggcgcagcgccaactccctgaccctcatcaaccccaccccctactacctgacggtgaccgagctgaacgccggcacccgggtgctcgagaacgccctggtcccgcccatgggcgagagcaccgtgaagctgccctccgacgcggggagcaacatcacgtaccgcaccatcaacgactacggcgccctcacccccaagatgaccggggtgatggagtgatgatgaggactagtccctgttcccagagcccacttttttttctttttttgaaataaaatagcctgtctttcagatctaaaaaaaaaaaaaaaaaaaaaaaaaaaaaaaaaaaaaaaaaaaaaaaaaaaaaaaaaaaaaaaaaaaaaaaaaaaaaaaaaaaaaaaaaaaaaaaaaaaa

SEQ ID NO: 1123 - RNA, 1157 nt, synthetic construct
  misc_feature 1..1157: note Artificial____Ec(J96)-FimH(1-21)_Ec(J96)-FimH(22-300) mRNA opt1
  source 1..1157: mol_type = other RNA
aggagagtcccgcagtcggcgtccagcggctctgcttgttcgtgtgtgtgtcgttgcaggccttattcaagcttaccatgaagcgcgtgatcaccctgttcgccgtcctcctgatgggctggagcgtgaacgcctggtccttcgcctgcaagaccgccaacggcaccgcgatccccatcgggggcgggagcgccaacgtgtacgtcaacctggccccggtggtgaacgtcggccagaacctcgtggtggacctgtccacgcagatcttctgccacaacgactaccccgagaccatcaccgactacgtcaccctgcagcgcgggagcgcctacggcggcgtgctctccaacttcagcgggacggtgaagtactccggcagctcctaccccttccccaccaccagcgagaccccgcgggtcgtgtacaactcccgcacggacaagccctggcccgtggccctgtacctgacccccgtcagctccgccgggggcgtggcgatcaaggccgggagcctcatcgccgtgctgatcctgcggcagaccaacaactacaactccgacgacttccagttcgtctggaacatctacgcgaacaacgacgtggtggtcccgaccggcggctgcgacgtgagcgcccgcgacgtgacggtcaccctccccgactaccccgggtccgtgcccatcccgctgaccgtgtactgcgccaagagccagaacctgggctactacctctccgggaccacggccgacgccggcaacagcatcttcaccaacaccgcgtccttcagccccgcccagggcgtcggggtgcagctgacccggaacggcacgatcatccccgccaacaacaccgtcagcctgggggccgtgggcacctccgccgtgagcctcgggctgaccgcgaactacgcccgcacgggcggccaggtcaccgccgggaacgtgcagtccatcatcggcgtgaccttcgtctaccagtgatgatgaggactagtccctgttcccagagcccacttttttttctttttttgaaataaaatagcctgtctttcagatctaaaaaaaaaaaaaaaaaaaaaaaaaaaaaaaaaaaaaaaaaaaaaaaaaaaaaaaaaaaaaaaaaaaaaaaaaaaaaaaaaaaaaaaaaaaaaaaaaaaa

SEQ ID NO: 1124 - RNA, 1148 nt, synthetic construct
  misc_feature 1..1148: note = Artificial____HsIgE(1-18)_Ec(J96)-FimH(22-300) mRNA opt1
  source 1..1148: mol_type = other RNA
aggagagtcccgcagtcggcgtccagcggctctgcttgttcgtgtgtgtgtcgttgcaggccttattcaagcttaccatggactggacctggatcctgttcctcgtggccgccgcgacccgcgtccacagcttcgcctgcaagaccgccaacggcaccgcgatccccatcgggggcgggagcgccaacgtgtacgtcaacctggccccggtggtgaacgtcggccagaacctcgtggtggacctgtccacgcagatcttctgccacaacgactaccccgagaccatcaccgactacgtcaccctgcagcgcgggagcgcctacggcggcgtgctctccaacttcagcgggacggtgaagtactccggcagctcctaccccttccccaccaccagcgagaccccgcgggtcgtgtacaactcccgcacggacaagccctggcccgtggccctgtacctgacccccgtcagctccgccgggggcgtggcgatcaaggccgggagcctcatcgccgtgctgatcctgcggcagaccaacaactacaactccgacgacttccagttcgtctggaacatctacgcgaacaacgacgtggtggtcccgaccggcggctgcgacgtgagcgcccgcgacgtgacggtcaccctccccgactaccccgggtccgtgcccatcccgctgaccgtgtactgcgccaagagccagaacctgggctactacctctccgggaccacggccgacgccggcaacagcatcttcaccaacaccgcgtccttcagccccgcccagggcgtcggggtgcagctgacccggaacggcacgatcatccccgccaacaacaccgtcagcctgggggccgtgggcacctccgccgtgagcctcgggctgaccgcgaactacgcccgcacgggcggccaggtcaccgccgggaacgtgcagtccatcatcggcgtgaccttcgtctaccagtgatgatgaggactagtccctgttcccagagcccacttttttttctttttttgaaataaaatagcctgtctttcagatctaaaaaaaaaaaaaaaaaaaaaaaaaaaaaaaaaaaaaaaaaaaaaaaaaaaaaaaaaaaaaaaaaaaaaaaaaaaaaaaaaaaaaaaaaaaaaaaaaaaa

SEQ ID NO: 1125 - RNA, 1154 nt, synthetic construct
  misc_feature 1..1154: note = Artificial____MmIgK(1-20)_Ec(J96)-FimH(22-300) mRNA opt1
  source 1..1154: mol_type = other RNA
aggagagtcccgcagtcggcgtccagcggctctgcttgttcgtgtgtgtgtcgttgcaggccttattcaagcttaccatggagaccgacaccctgctcctgtgggtgctgctcctgtgggtccccggcagcacggggttcgcctgcaagaccgccaacggcaccgcgatccccatcgggggcgggagcgccaacgtgtacgtcaacctggccccggtggtgaacgtcggccagaacctcgtggtggacctgtccacgcagatcttctgccacaacgactaccccgagaccatcaccgactacgtcaccctgcagcgcgggagcgcctacggcggcgtgctctccaacttcagcgggacggtgaagtactccggcagctcctaccccttccccaccaccagcgagaccccgcgggtcgtgtacaactcccgcacggacaagccctggcccgtggccctgtacctgacccccgtcagctccgccgggggcgtggcgatcaaggccgggagcctcatcgccgtgctgatcctgcggcagaccaacaactacaactccgacgacttccagttcgtctggaacatctacgcgaacaacgacgtggtggtcccgaccggcggctgcgacgtgagcgcccgcgacgtgacggtcaccctccccgactaccccgggtccgtgcccatcccgctgaccgtgtactgcgccaagagccagaacctgggctactacctctccgggaccacggccgacgccggcaacagcatcttcaccaacaccgcgtccttcagccccgcccagggcgtcggggtgcagctgacccggaacggcacgatcatccccgccaacaacaccgtcagcctgggggccgtgggcacctccgccgtgagcctcgggctgaccgcgaactacgcccgcacgggcggccaggtcaccgccgggaacgtgcagtccatcatcggcgtgaccttcgtctaccagtgatgatgaggactagtccctgttcccagagcccacttttttttctttttttgaaataaaatagcctgtctttcagatctaaaaaaaaaaaaaaaaaaaaaaaaaaaaaaaaaaaaaaaaaaaaaaaaaaaaaaaaaaaaaaaaaaaaaaaaaaaaaaaaaaaaaaaaaaaaaaaaaaaa

SEQ ID NO: 1126 - RNA, 1214 nt, synthetic construct
  misc_feature 1..1214: note Artificial____Ec(J96)-FimH(1-21)_Ec(J96)-FimH(22-300)_Linke r-PGDGN_Ec(J96)-FimG(24-37) mRNA opt1
  source 1..1214: mol_type = other RNA
aggagagtcccgcagtcggcgtccagcggctctgcttgttcgtgtgtgtgtcgttgcaggccttattcaagcttaccatgaagcgcgtgatcaccctgttcgccgtcctcctgatgggctggagcgtgaacgcctggtccttcgcctgcaagaccgccaacggcaccgcgatccccatcgggggcgggagcgccaacgtgtacgtcaacctggccccggtggtgaacgtcggccagaacctcgtggtggacctgtccacgcagatcttctgccacaacgactaccccgagaccatcaccgactacgtcaccctgcagcgcgggagcgcctacggcggcgtgctctccaacttcagcgggacggtgaagtactccggcagctcctaccccttccccaccaccagcgagaccccgcgggtcgtgtacaactcccgcacggacaagccctggcccgtggccctgtacctgacccccgtcagctccgccgggggcgtggcgatcaaggccgggagcctcatcgccgtgctgatcctgcggcagaccaacaactacaactccgacgacttccagttcgtctggaacatctacgcgaacaacgacgtggtggtcccgaccggcggctgcgacgtgagcgcccgcgacgtgacggtcaccctccccgactaccccgggtccgtgcccatcccgctgaccgtgtactgcgccaagagccagaacctgggctactacctctccgggaccacggccgacgccggcaacagcatcttcaccaacaccgcgtccttcagccccgcccagggcgtcggggtgcagctgacccggaacggcacgatcatccccgccaacaacaccgtcagcctgggggccgtgggcacctccgccgtgagcctcgggctgaccgcgaactacgcccgcacgggcggccaggtcaccgccgggaacgtgcagtccatcatcggcgtgaccttcgtctaccagcccggcgacgggaacgccgacgtgaccatcaccgtcaacggcaaggtggtggccaagtgatgatgaggactagtccctgttcccagagcccacttttttttctttttttgaaataaaatagcctgtctttcagatctaaaaaaaaaaaaaaaaaaaaaaaaaaaaaaaaaaaaaaaaaaaaaaaaaaaaaaaaaaaaaaaaaaaaaaaaaaaaaaaaaaaaaaaaaaaaaaaaaaaa

SEQ ID NO: 1127 - RNA, 1205 nt, synthetic construct
  misc_feature 1..1205: note Artificial____HsIgE(1-18)_Ec(J96)-FimH(22-300)_Linker-PGDGN _Ec(J96)-FimG(24-37) mRNA opt1
  source 1..1205: mol_type = other RNA
aggagagtcccgcagtcggcgtccagcggctctgcttgttcgtgtgtgtgtcgttgcaggccttattcaagcttaccatggactggacctggatcctgttcctcgtggccgccgcgacccgcgtccacagcttcgcctgcaagaccgccaacggcaccgcgatccccatcgggggcgggagcgccaacgtgtacgtcaacctggccccggtggtgaacgtcggccagaacctcgtggtggacctgtccacgcagatcttctgccacaacgactaccccgagaccatcaccgactacgtcaccctgcagcgcgggagcgcctacggcggcgtgctctccaacttcagcgggacggtgaagtactccggcagctcctaccccttccccaccaccagcgagaccccgcgggtcgtgtacaactcccgcacggacaagccctggcccgtggccctgtacctgacccccgtcagctccgccgggggcgtggcgatcaaggccgggagcctcatcgccgtgctgatcctgcggcagaccaacaactacaactccgacgacttccagttcgtctggaacatctacgcgaacaacgacgtggtggtcccgaccggcggctgcgacgtgagcgcccgcgacgtgacggtcaccctccccgactaccccgggtccgtgcccatcccgctgaccgtgtactgcgccaagagccagaacctgggctactacctctccgggaccacggccgacgccggcaacagcatcttcaccaacaccgcgtccttcagccccgcccagggcgtcggggtgcagctgacccggaacggcacgatcatccccgccaacaacaccgtcagcctgggggccgtgggcacctccgccgtgagcctcgggctgaccgcgaactacgcccgcacgggcggccaggtcaccgccgggaacgtgcagtccatcatcggcgtgaccttcgtctaccagcccggcgacgggaacgccgacgtgaccatcaccgtcaacggcaaggtggtggccaagtgatgatgaggactagtccctgttcccagagcccacttttttttctttttttgaaataaaatagcctgtctttcagatctaaaaaaaaaaaaaaaaaaaaaaaaaaaaaaaaaaaaaaaaaaaaaaaaaaaaaaaaaaaaaaaaaaaaaaaaaaaaaaaaaaaaaaaaaaaaaaaaaaaa

SEQ ID NO: 1128 - RNA, 1211 nt, synthetic construct
  misc_feature 1..1211: note Artificial____HsIgE(1-18)_Ec(J96)-FimH(22-300)_Linker-G4SGG _Ec(J96)-FimG(24-37) mRNA opt1
  source 1..1211: mol_type = other RNA
aggagagtcccgcagtcggcgtccagcggctctgcttgttcgtgtgtgtgtcgttgcaggccttattcaagcttaccatggactggacctggatcctgttcctcgtggccgccgcgacccgcgtccacagcttcgcctgcaagaccgccaacggcaccgcgatccccatcgggggcgggagcgccaacgtgtacgtcaacctggccccggtggtgaacgtcggccagaacctcgtggtggacctgtccacgcagatcttctgccacaacgactaccccgagaccatcaccgactacgtcaccctgcagcgcgggagcgcctacggcggcgtgctctccaacttcagcgggacggtgaagtactccggcagctcctaccccttccccaccaccagcgagaccccgcgggtcgtgtacaactcccgcacggacaagccctggcccgtggccctgtacctgacccccgtcagctccgccgggggcgtggcgatcaaggccgggagcctcatcgccgtgctgatcctgcggcagaccaacaactacaactccgacgacttccagttcgtctggaacatctacgcgaacaacgacgtggtggtcccgaccggcggctgcgacgtgagcgcccgcgacgtgacggtcaccctccccgactaccccgggtccgtgcccatcccgctgaccgtgtactgcgccaagagccagaacctgggctactacctctccgggaccacggccgacgccggcaacagcatcttcaccaacaccgcgtccttcagccccgcccagggcgtcggggtgcagctgacccggaacggcacgatcatccccgccaacaacaccgtcagcctgggggccgtgggcacctccgccgtgagcctcgggctgaccgcgaactacgcccgcacgggcggccaggtcaccgccgggaacgtgcagtccatcatcggcgtgaccttcgtctaccagggcggcggcggctccggaggcgccgacgtgaccatcaccgtcaacggcaaggtggtggccaagtgatgatgaggactagtccctgttcccagagcccacttttttttctttttttgaaataaaatagcctgtctttcagatctaaaaaaaaaaaaaaaaaaaaaaaaaaaaaaaaaaaaaaaaaaaaaaaaaaaaaaaaaaaaaaaaaaaaaaaaaaaaaaaaaaaaaaaaaaaaaaaaaaaa

SEQ ID NO: 1129 - RNA, 1211 nt, synthetic construct
  misc_feature 1..1211: note Artificial____MmIgK(1-20)_Ec(J96)-FimH(22-300)_Linker-PGDGN _Ec(J96)-FimG(24-37) mRNA opt1
  source 1..1211: mol_type = other RNA
aggagagtcccgcagtcggcgtccagcggctctgcttgttcgtgtgtgtgtcgttgcaggccttattcaagcttaccatggagaccgacaccctgctcctgtgggtgctgctcctgtgggtccccggcagcacggggttcgcctgcaagaccgccaacggcaccgcgatccccatcgggggcgggagcgccaacgtgtacgtcaacctggccccggtggtgaacgtcggccagaacctcgtggtggacctgtccacgcagatcttctgccacaacgactaccccgagaccatcaccgactacgtcaccctgcagcgcgggagcgcctacggcggcgtgctctccaacttcagcgggacggtgaagtactccggcagctcctaccccttccccaccaccagcgagaccccgcgggtcgtgtacaactcccgcacggacaagccctggcccgtggccctgtacctgacccccgtcagctccgccgggggcgtggcgatcaaggccgggagcctcatcgccgtgctgatcctgcggcagaccaacaactacaactccgacgacttccagttcgtctggaacatctacgcgaacaacgacgtggtggtcccgaccggcggctgcgacgtgagcgcccgcgacgtgacggtcaccctccccgactaccccgggtccgtgcccatcccgctgaccgtgtactgcgccaagagccagaacctgggctactacctctccgggaccacggccgacgccggcaacagcatcttcaccaacaccgcgtccttcagccccgcccagggcgtcggggtgcagctgacccggaacggcacgatcatccccgccaacaacaccgtcagcctgggggccgtgggcacctccgccgtgagcctcgggctgaccgcgaactacgcccgcacgggcggccaggtcaccgccgggaacgtgcagtccatcatcggcgtgaccttcgtctaccagcccggcgacgggaacgccgacgtgaccatcaccgtcaacggcaaggtggtggccaagtgatgatgaggactagtccctgttcccagagcccacttttttttctttttttgaaataaaatagcctgtctttcagatctaaaaaaaaaaaaaaaaaaaaaaaaaaaaaaaaaaaaaaaaaaaaaaaaaaaaaaaaaaaaaaaaaaaaaaaaaaaaaaaaaaaaaaaaaaaaaaaaaaaa

SEQ ID NO: 1130 - RNA, 1211 nt, synthetic construct
  misc_feature 1..1211: note Artificial____MmIgK(1-20)_Ec(536)-FimH(22-300)_Linker-PGDGN _Ec(J96)-FimG(24-37) mRNA opt1
  source 1..1211: mol_type = other RNA
aggagagtcccgcagtcggcgtccagcggctctgcttgttcgtgtgtgtgtcgttgcaggccttattcaagcttaccatggagaccgacaccctgctcctgtgggtgctgctcctgtgggtccccggcagcacggggttcgcctgcaagaccgccaacggcaccgcgatccccatcgggggcgggagcgccaacgtgtacgtcaacctggccccggccgtgaacgtcggccagaacctcgtggtggacctgtccacgcagatcttctgccacaacgactaccccgagaccatcaccgactacgtcaccctgcagcgcgggagcgcctacggcggcgtgctctccagcttcagcgggacggtgaagtacaacggcagctcctaccccttccccaccaccagcgagaccccgcgggtcgtgtacaactcccgcacggacaagccctggcccgtggccctgtacctgacccccgtcagctccgccgggggcgtggcgatcaaggccgggagcctcatcgccgtgctgatcctgcggcagaccaacaactacaactccgacgacttccagttcgtctggaacatctacgcgaacaacgacgtggtggtcccgaccggcggctgcgacgtgagcgcccgcgacgtgacggtcaccctccccgactaccccgggtccgtgcccatcccgctgaccgtgtactgcgccaagagccagaacctgggctactacctctccgggaccacggccgacgccggcaacagcatcttcaccaacaccgcgtccttcagccccgcccagggcgtcggggtgcagctgacccggaacggcacgatcatccccgccaacaacaccgtcagcctgggggccgtgggcacctccgccgtgagcctcgggctgaccgcgaactacgcccgcacgggcggccaggtcaccgccgggaacgtgcagtccatcatcggcgtgaccttcgtctaccagcccggcgacgggaacgccgacgtgaccatcaccgtcaacggcaaggtggtggccaagtgatgatgaggactagtccctgttcccagagcccacttttttttctttttttgaaataaaatagcctgtctttcagatctaaaaaaaaaaaaaaaaaaaaaaaaaaaaaaaaaaaaaaaaaaaaaaaaaaaaaaaaaaaaaaaaaaaaaaaaaaaaaaaaaaaaaaaaaaaaaaaaaaaa

SEQ ID NO: 1131 - RNA, 1235 nt, synthetic construct
  misc_feature 1..1235: note Artificial____HsIgE(1-18)_Ec(J96)-FimH(22-300)_Linker-(G4S) 3_Ec(J96)-FimC(135-148) mRNA opt1
  source 1..1235: mol_type = other RNA
aggagagtcccgcagtcggcgtccagcggctctgcttgttcgtgtgtgtgtcgttgcaggccttattcaagcttaccatggactggacctggatcctgttcctcgtggccgccgcgacccgcgtccacagcttcgcctgcaagaccgccaacggcaccgcgatccccatcgggggcgggagcgccaacgtgtacgtcaacctggccccggtggtgaacgtcggccagaacctcgtggtggacctgtccacgcagatcttctgccacaacgactaccccgagaccatcaccgactacgtcaccctgcagcgcgggagcgcctacggcggcgtgctctccaacttcagcgggacggtgaagtactccggcagctcctaccccttccccaccaccagcgagaccccgcgggtcgtgtacaactcccgcacggacaagccctggcccgtggccctgtacctgacccccgtcagctccgccgggggcgtggcgatcaaggccgggagcctcatcgccgtgctgatcctgcggcagaccaacaactacaactccgacgacttccagttcgtctggaacatctacgcgaacaacgacgtggtggtcccgaccggcggctgcgacgtgagcgcccgcgacgtgacggtcaccctccccgactaccccgggtccgtgcccatcccgctgaccgtgtactgcgccaagagccagaacctgggctactacctctccgggaccacggccgacgccggcaacagcatcttcaccaacaccgcgtccttcagccccgcccagggcgtcggggtgcagctgacccggaacggcacgatcatccccgccaacaacaccgtcagcctgggggccgtgggcacctccgccgtgagcctcgggctgaccgcgaactacgcccgcacgggcggccaggtcaccgccgggaacgtgcagtccatcatcggcgtgaccttcgtctaccagggcgggggcgggagcggcgggggcggctccgggggcgggggcagcacggagaacaccctgcagctcgccatcatctcccgcatcaagtgatgatgaggactagtccctgttcccagagcccacttttttttctttttttgaaataaaatagcctgtctttcagatctaaaaaaaaaaaaaaaaaaaaaaaaaaaaaaaaaaaaaaaaaaaaaaaaaaaaaaaaaaaaaaaaaaaaaaaaaaaaaaaaaaaaaaaaaaaaaaaaaaaa

SEQ ID NO: 1132 - RNA, 1658 nt, synthetic construct
  misc_feature 1..1658: note Artificial____LumSynth(1-154_C37A_N102D)_Linker(GGS)4-GGG_E c(J96)-FimH(22-300)_Linker-PGDGN_Ec(J96)-FimG(24-37) mRNA opt1
  source 1..1658: mol_type = other RNA
aggagagtcccgcagtcggcgtccagcggctctgcttgttcgtgtgtgtgtcgttgcaggccttattcaagcttaccatgcagatctacgagggcaagctgaccgccgaggggctccgcttcggcatcgtggccagccggttcaaccacgcgctggtcgaccgcctggtggagggggccatcgacgccatcgtgcggcacggcgggcgcgaggaggacatcaccctcgtccgggtgcccggctcctgggagatcccggtggccgccggcgagctggcccgcaaggaggacatcgacgcggtcatcgccatcggggtgctgatccggggcgccacgccccacttcgactacatcgccagcgaggtgtccaaggggctcgcggacctgagcctggagctccgcaagcccatcaccttcggcgtcatcaccgccgacaccctggagcaggccatcgagcgggccgggacgaagcacggcaacaagggctgggaggccgcgctgtccgccatcgagatggccaacctcttcaagagcctgcgcggcgggagcggcgggtccggcgggagcggcggctccgggggcgggttcgcctgcaagaccgccaacggcaccgcgatccccatcgggggcgggagcgccaacgtgtacgtcaacctggccccggtggtgaacgtcggccagaacctcgtggtggacctgtccacgcagatcttctgccacaacgactaccccgagaccatcaccgactacgtcaccctgcagcgcgggagcgcctacggcggcgtgctctccaacttcagcgggacggtgaagtactccggcagctcctaccccttccccaccaccagcgagaccccgcgggtcgtgtacaactcccgcacggacaagccctggcccgtggccctgtacctgacccccgtcagctccgccgggggcgtggcgatcaaggccgggagcctcatcgccgtgctgatcctgcggcagaccaacaactacaactccgacgacttccagttcgtctggaacatctacgcgaacaacgacgtggtggtcccgaccggcggctgcgacgtgagcgcccgcgacgtgacggtcaccctccccgactaccccgggtccgtgcccatcccgctgaccgtgtactgcgccaagagccagaacctgggctactacctctccgggaccacggccgacgccggcaacagcatcttcaccaacaccgcgtccttcagccccgcccagggcgtcggggtgcagctgacccggaacggcacgatcatccccgccaacaacaccgtcagcctgggggccgtgggcacctccgccgtgagcctcgggctgaccgcgaactacgcccgcacgggcggccaggtcaccgccgggaacgtgcagtccatcatcggcgtgaccttcgtctaccagcccggcgacgggaacgccgacgtgaccatcaccgtcaacggcaaggtggtggccaagtgatgatgaggactagtccctgttcccagagcccacttttttttctttttttgaaataaaatagcctgtctttcagatctaaaaaaaaaaaaaaaaaaaaaaaaaaaaaaaaaaaaaaaaaaaaaaaaaaaaaaaaaaaaaaaaaaaaaaaaaaaaaaaaaaaaaaaaaaaaaaaaaaaa

SEQ ID NO: 1133 - RNA, 1676 nt, synthetic construct
  misc_feature 1..1676: note Artificial____HsIgE(1-18)_Ec(J96)-FimH(22-300)_Linker-PGDGN _Ec(J96)-FimG(24-37)_Linker-SGG_LumSynth(1-154_C37A_N102D) mRNA opt1
  source 1..1676: mol_type = other RNA
aggagagtcccgcagtcggcgtccagcggctctgcttgttcgtgtgtgtgtcgttgcaggccttattcaagcttaccatggactggacctggatcctgttcctcgtggccgccgcgacccgcgtccacagcttcgcctgcaagaccgccaacggcaccgcgatccccatcgggggcgggagcgccaacgtgtacgtcaacctggccccggtggtgaacgtcggccagaacctcgtggtggacctgtccacgcagatcttctgccacaacgactaccccgagaccatcaccgactacgtcaccctgcagcgcgggagcgcctacggcggcgtgctctccaacttcagcgggacggtgaagtactccggcagctcctaccccttccccaccaccagcgagaccccgcgggtcgtgtacaactcccgcacggacaagccctggcccgtggccctgtacctgacccccgtcagctccgccgggggcgtggcgatcaaggccgggagcctcatcgccgtgctgatcctgcggcagaccaacaactacaactccgacgacttccagttcgtctggaacatctacgcgaacaacgacgtggtggtcccgaccggcggctgcgacgtgagcgcccgcgacgtgacggtcaccctccccgactaccccgggtccgtgcccatcccgctgaccgtgtactgcgccaagagccagaacctgggctactacctctccgggaccacggccgacgccggcaacagcatcttcaccaacaccgcgtccttcagccccgcccagggcgtcggggtgcagctgacccggaacggcacgatcatccccgccaacaacaccgtcagcctgggggccgtgggcacctccgccgtgagcctcgggctgaccgcgaactacgcccgcacgggcggccaggtcaccgccgggaacgtgcagtccatcatcggcgtgaccttcgtctaccagcccggcgacgggaacgccgacgtgaccatcaccgtcaacggcaaggtggtggccaagagcggcgggatgcagatctacgagggcaagctgaccgccgaggggctccgcttcggcatcgtggccagccggttcaaccacgcgctggtcgaccgcctggtggagggggccatcgacgccatcgtgcggcacggcgggcgcgaggaggacatcaccctcgtccgggtgcccggctcctgggagatcccggtggccgccggcgagctggcccgcaaggaggacatcgacgcggtcatcgccatcggggtgctgatccggggcgccacgccccacttcgactacatcgccagcgaggtgtccaaggggctcgcggacctgagcctggagctccgcaagcccatcaccttcggcgtcatcaccgccgacaccctggagcaggccatcgagcgggccgggacgaagcacggcaacaagggctgggaggccgcgctgtccgccatcgagatggccaacctcttcaagagcctgcgctgatgatgaggactagtccctgttcccagagcccacttttttttctttttttgaaataaaatagcctgtctttcagatctaaaaaaaaaaaaaaaaaaaaaaaaaaaaaaaaaaaaaaaaaaaaaaaaaaaaaaaaaaaaaaaaaaaaaaaaaaaaaaaaaaaaaaaaaaaaaaaaaaaa

SEQ ID NO: 1134 - RNA, 1703 nt, synthetic construct
  misc_feature 1..1703: note Artificial____HsIgE(1-18)_Ec(J96)-FimH(22-300)_Linker-PGDGN _Ec(J96)-FimG(24-37)_Linker-SGG_Ferritin(5-167_N19Q) mRNA opt1
  source 1..1703: mol_type = other RNA
aggagagtcccgcagtcggcgtccagcggctctgcttgttcgtgtgtgtgtcgttgcaggccttattcaagcttaccatggactggacctggatcctgttcctcgtggccgccgcgacccgcgtccacagcttcgcctgcaagaccgccaacggcaccgcgatccccatcgggggcgggagcgccaacgtgtacgtcaacctggccccggtggtgaacgtcggccagaacctcgtggtggacctgtccacgcagatcttctgccacaacgactaccccgagaccatcaccgactacgtcaccctgcagcgcgggagcgcctacggcggcgtgctctccaacttcagcgggacggtgaagtactccggcagctcctaccccttccccaccaccagcgagaccccgcgggtcgtgtacaactcccgcacggacaagccctggcccgtggccctgtacctgacccccgtcagctccgccgggggcgtggcgatcaaggccgggagcctcatcgccgtgctgatcctgcggcagaccaacaactacaactccgacgacttccagttcgtctggaacatctacgcgaacaacgacgtggtggtcccgaccggcggctgcgacgtgagcgcccgcgacgtgacggtcaccctccccgactaccccgggtccgtgcccatcccgctgaccgtgtactgcgccaagagccagaacctgggctactacctctccgggaccacggccgacgccggcaacagcatcttcaccaacaccgcgtccttcagccccgcccagggcgtcggggtgcagctgacccggaacggcacgatcatccccgccaacaacaccgtcagcctgggggccgtgggcacctccgccgtgagcctcgggctgaccgcgaactacgcccgcacgggcggccaggtcaccgccgggaacgtgcagtccatcatcggcgtgaccttcgtctaccagcccggcgacgggaacgccgacgtgaccatcaccgtcaacggcaaggtggtggccaagagcggcggggacatcatcaagctcctgaacgagcaggtcaacaaggagatgcagtccagcaacctgtacatgtccatgagctcctggtgctacacccacagcctcgacggcgccgggctgttcctgttcgaccacgccgcggaggagtacgagcacgccaagaagctcatcatcttcctgaacgagaacaacgtgcccgtgcagctgacctccatcagcgccccggagcacaagttcgagggcctcacgcagatcttccagaaggcctacgagcacgagcagcacatctccgagagcatcaacaacatcgtggaccacgccatcaagtccaaggaccacgcgaccttcaacttcctgcagtggtacgtcgccgagcagcacgaggaggaggtgctgttcaaggacatcctcgacaagatcgagctgatcgggaacgagaaccacggcctgtacctcgccgaccagtacgtgaaggggatcgccaagagccgcaagtcctgatgatgaggactagtccctgttcccagagcccacttttttttctttttttgaaataaaatagcctgtctttcagatctaaaaaaaaaaaaaaaaaaaaaaaaaaaaaaaaaaaaaaaaaaaaaaaaaaaaaaaaaaaaaaaaaaaaaaaaaaaaaaaaaaaaaaaaaaaaaaaaaaaa

SEQ ID NO: 1135 - RNA, 1733 nt, synthetic construct
  misc_feature 1..1733: note Artificial____MmIgK(1-20)_Ec(J96)-FimH(22-300)_Linker-PGDGN _Ec(J96)-FimG(24-37)_Linker-(GGS)4_Ferritin(5-166) mRNA opt1
  source 1..1733: mol_type = other RNA
aggagagtcccgcagtcggcgtccagcggctctgcttgttcgtgtgtgtgtcgttgcaggccttattcaagcttaccatggagaccgacaccctgctcctgtgggtgctgctcctgtgggtccccggcagcacggggttcgcctgcaagaccgccaacggcaccgcgatccccatcgggggcgggagcgccaacgtgtacgtcaacctggccccggtggtgaacgtcggccagaacctcgtggtggacctgtccacgcagatcttctgccacaacgactaccccgagaccatcaccgactacgtcaccctgcagcgcgggagcgcctacggcggcgtgctctccaacttcagcgggacggtgaagtactccggcagctcctaccccttccccaccaccagcgagaccccgcgggtcgtgtacaactcccgcacggacaagccctggcccgtggccctgtacctgacccccgtcagctccgccgggggcgtggcgatcaaggccgggagcctcatcgccgtgctgatcctgcggcagaccaacaactacaactccgacgacttccagttcgtctggaacatctacgcgaacaacgacgtggtggtcccgaccggcggctgcgacgtgagcgcccgcgacgtgacggtcaccctccccgactaccccgggtccgtgcccatcccgctgaccgtgtactgcgccaagagccagaacctgggctactacctctccgggaccacggccgacgccggcaacagcatcttcaccaacaccgcgtccttcagccccgcccagggcgtcggggtgcagctgacccggaacggcacgatcatccccgccaacaacaccgtcagcctgggggccgtgggcacctccgccgtgagcctcgggctgaccgcgaactacgcccgcacgggcggccaggtcaccgccgggaacgtgcagtccatcatcggcgtgaccttcgtctaccagcccggcgacgggaacgccgacgtgaccatcaccgtcaacggcaaggtggtggccaagggcgggagcggcgggtccggcgggagcggcggctccgacatcatcaagctcctgaacgagcaggtcaacaaggagatgaactccagcaacctgtacatgtccatgagctcctggtgctacacccacagcctcgacggcgccgggctgttcctgttcgaccacgccgcggaggagtacgagcacgccaagaagctcatcatcttcctgaacgagaacaacgtgcccgtgcagctgacctccatcagcgccccggagcacaagttcgagggcctcacgcagatcttccagaaggcctacgagcacgagcagcacatctccgagagcatcaacaacatcgtggaccacgccatcaagtccaaggaccacgcgaccttcaacttcctgcagtggtacgtcgccgagcagcacgaggaggaggtgctgttcaaggacatcctcgacaagatcgagctgatcgggaacgagaaccacggcctgtacctcgccgaccagtacgtgaaggggatcgccaagagccgcaagtgatgatgaggactagtccctgttcccagagcccacttttttttctttttttgaaataaaatagcctgtctttcagatctaaaaaaaaaaaaaaaaaaaaaaaaaaaaaaaaaaaaaaaaaaaaaaaaaaaaaaaaaaaaaaaaaaaaaaaaaaaaaaaaaaaaaaaaaaaaaaaaaaaa

SEQ ID NO: 1136 - RNA, 1376 nt, synthetic construct
  misc_feature 1..1376: note Artificial____HsIgE(1-18)_Ec(J96)-FimH(22-300)_Linker-PGDGN _Ec(J96)-FimG(24-37)_TMdomain-HA(510-566) mRNA opt1
  source 1..1376: mol_type = other RNA
aggagagtcccgcagtcggcgtccagcggctctgcttgttcgtgtgtgtgtcgttgcaggccttattcaagcttaccatggactggacctggatcctgttcctcgtggccgccgcgacccgcgtccacagcttcgcctgcaagaccgccaacggcaccgcgatccccatcgggggcgggagcgccaacgtgtacgtcaacctggccccggtggtgaacgtcggccagaacctcgtggtggacctgtccacgcagatcttctgccacaacgactaccccgagaccatcaccgactacgtcaccctgcagcgcgggagcgcctacggcggcgtgctctccaacttcagcgggacggtgaagtactccggcagctcctaccccttccccaccaccagcgagaccccgcgggtcgtgtacaactcccgcacggacaagccctggcccgtggccctgtacctgacccccgtcagctccgccgggggcgtggcgatcaaggccgggagcctcatcgccgtgctgatcctgcggcagaccaacaactacaactccgacgacttccagttcgtctggaacatctacgcgaacaacgacgtggtggtcccgaccggcggctgcgacgtgagcgcccgcgacgtgacggtcaccctccccgactaccccgggtccgtgcccatcccgctgaccgtgtactgcgccaagagccagaacctgggctactacctctccgggaccacggccgacgccggcaacagcatcttcaccaacaccgcgtccttcagccccgcccagggcgtcggggtgcagctgacccggaacggcacgatcatccccgccaacaacaccgtcagcctgggggccgtgggcacctccgccgtgagcctcgggctgaccgcgaactacgcccgcacgggcggccaggtcaccgccgggaacgtgcagtccatcatcggcgtgaccttcgtctaccagcccggcgacgggaacgccgacgtgaccatcaccgtcaacggcaaggtggtggccaaggccaagctgaaccgcgaggagatcgacggcgtgaagctcgagtccacgcggatctaccagatcctggcgatctacagcaccgtcgccagctccctggtgctcgtggtcagcctgggggccatctccttctggatgtgcagcaacggctccctgcagtgccgcatctgcatctgatgatgaggactagtccctgttcccagagcccacttttttttctttttttgaaataaaatagcctgtctttcagatctaaaaaaaaaaaaaaaaaaaaaaaaaaaaaaaaaaaaaaaaaaaaaaaaaaaaaaaaaaaaaaaaaaaaaaaaaaaaaaaaaaaaaaaaaaaaaaaaaaaa

SEQ ID NO: 1137 - RNA, 1709 nt, synthetic construct
  misc_feature 1..1709: note Artificial____HsIgE(1-18)_LumSynth(1-154_C37A_N102D)_Linker (GGS)4-GGG_Ec(J96)-FimH(22-300)_Linker-PGDGN_Ec(J96)-FimG(2 4-37) mRNA opt1
  source 1..1709: mol_type = other RNA
aggagagtcccgcagtcggcgtccagcggctctgcttgttcgtgtgtgtgtcgttgcaggccttattcaagcttaccatggactggacctggatcctgttcctcgtggccgccgcgacccgcgtccacagccagatctacgagggcaagctgaccgccgaggggctccgcttcggcatcgtggccagccggttcaaccacgcgctggtcgaccgcctggtggagggggccatcgacgccatcgtgcggcacggcgggcgcgaggaggacatcaccctcgtccgggtgcccggctcctgggagatcccggtggccgccggcgagctggcccgcaaggaggacatcgacgcggtcatcgccatcggggtgctgatccggggcgccacgccccacttcgactacatcgccagcgaggtgtccaaggggctcgcggacctgagcctggagctccgcaagcccatcaccttcggcgtcatcaccgccgacaccctggagcaggccatcgagcgggccgggacgaagcacggcaacaagggctgggaggccgcgctgtccgccatcgagatggccaacctcttcaagagcctgcgcggcgggagcggcgggtccggcgggagcggcggctccgggggcgggttcgcctgcaagaccgccaacggcaccgcgatccccatcgggggcgggagcgccaacgtgtacgtcaacctggccccggtggtgaacgtcggccagaacctcgtggtggacctgtccacgcagatcttctgccacaacgactaccccgagaccatcaccgactacgtcaccctgcagcgcgggagcgcctacggcggcgtgctctccaacttcagcgggacggtgaagtactccggcagctcctaccccttccccaccaccagcgagaccccgcgggtcgtgtacaactcccgcacggacaagccctggcccgtggccctgtacctgacccccgtcagctccgccgggggcgtggcgatcaaggccgggagcctcatcgccgtgctgatcctgcggcagaccaacaactacaactccgacgacttccagttcgtctggaacatctacgcgaacaacgacgtggtggtcccgaccggcggctgcgacgtgagcgcccgcgacgtgacggtcaccctccccgactaccccgggtccgtgcccatcccgctgaccgtgtactgcgccaagagccagaacctgggctactacctctccgggaccacggccgacgccggcaacagcatcttcaccaacaccgcgtccttcagccccgcccagggcgtcggggtgcagctgacccggaacggcacgatcatccccgccaacaacaccgtcagcctgggggccgtgggcacctccgccgtgagcctcgggctgaccgcgaactacgcccgcacgggcggccaggtcaccgccgggaacgtgcagtccatcatcggcgtgaccttcgtctaccagcccggcgacgggaacgccgacgtgaccatcaccgtcaacggcaaggtggtggccaagtgatgatgaggactagtccctgttcccagagcccacttttttttctttttttgaaataaaatagcctgtctttcagatctaaaaaaaaaaaaaaaaaaaaaaaaaaaaaaaaaaaaaaaaaaaaaaaaaaaaaaaaaaaaaaaaaaaaaaaaaaaaaaaaaaaaaaaaaaaaaaaaaaaa

SEQ ID NO: 1138 - RNA, 1676 nt, synthetic construct
  misc_feature 1..1676: note Artificial____HsIgE(1-18)_Ec(J96)-FimH(22-300_N28S_N91S_N24 9Q)_Linker-PGDGN_Ec(J96)-FimG(24-37)_Linker-SGG_LumSynth(1- 154_C37A_N102D) mRNA opt1
  source 1..1676: mol_type = other RNA
aggagagtcccgcagtcggcgtccagcggctctgcttgttcgtgtgtgtgtcgttgcaggccttattcaagcttaccatggactggacctggatcctgttcctcgtggccgccgcgacccgcgtccacagcttcgcctgcaagaccgccagcggcaccgcgatccccatcgggggcgggagcgccaacgtgtacgtcaacctggccccggtggtgaacgtcggccagaacctcgtggtggacctgtccacgcagatcttctgccacaacgactaccccgagaccatcaccgactacgtcaccctgcagcgcgggagcgcctacggcggcgtgctctccagcttcagcgggacggtgaagtactccggcagctcctaccccttccccaccaccagcgagaccccgcgggtcgtgtacaactcccgcacggacaagccctggcccgtggccctgtacctgacccccgtcagctccgccgggggcgtggcgatcaaggccgggagcctcatcgccgtgctgatcctgcggcagaccaacaactacaactccgacgacttccagttcgtctggaacatctacgcgaacaacgacgtggtggtcccgaccggcggctgcgacgtgagcgcccgcgacgtgacggtcaccctccccgactaccccgggtccgtgcccatcccgctgaccgtgtactgcgccaagagccagaacctgggctactacctctccgggaccacggccgacgccggcaacagcatcttcaccaacaccgcgtccttcagccccgcccagggcgtcggggtgcagctgacccggcagggcacgatcatccccgccaacaacaccgtcagcctgggggccgtgggcacctccgccgtgagcctcgggctgaccgcgaactacgcccgcacgggcggccaggtcaccgccgggaacgtgcagtccatcatcggcgtgaccttcgtctaccagcccggcgacgggaacgccgacgtgaccatcaccgtcaacggcaaggtggtggccaagagcggcgggatgcagatctacgagggcaagctgaccgccgaggggctccgcttcggcatcgtggccagccggttcaaccacgcgctggtcgaccgcctggtggagggggccatcgacgccatcgtgcggcacggcgggcgcgaggaggacatcaccctcgtccgggtgcccggctcctgggagatcccggtggccgccggcgagctggcccgcaaggaggacatcgacgcggtcatcgccatcggggtgctgatccggggcgccacgccccacttcgactacatcgccagcgaggtgtccaaggggctcgcggacctgagcctggagctccgcaagcccatcaccttcggcgtcatcaccgccgacaccctggagcaggccatcgagcgggccgggacgaagcacggcaacaagggctgggaggccgcgctgtccgccatcgagatggccaacctcttcaagagcctgcgctgatgatgaggactagtccctgttcccagagcccacttttttttctttttttgaaataaaatagcctgtctttcagatctaaaaaaaaaaaaaaaaaaaaaaaaaaaaaaaaaaaaaaaaaaaaaaaaaaaaaaaaaaaaaaaaaaaaaaaaaaaaaaaaaaaaaaaaaaaaaaaaaaaa

SEQ ID NO: 1139 - RNA, 1676 nt, synthetic construct
  misc_feature 1..1676: note Artificial____HsIgE(1-18)_Ec(J96)-FimH(22-300_N28S_N91S_N24 9Q_N256D)_Linker-PGDGN_Ec(J96)-FimG(24-37)_Linker-SGG_LumSy nth(1-154_C37A_N102D) mRNA opt1
  source 1..1676: mol_type = other RNA
aggagagtcccgcagtcggcgtccagcggctctgcttgttcgtgtgtgtgtcgttgcaggccttattcaagcttaccatggactggacctggatcctgttcctcgtggccgccgcgacccgcgtccacagcttcgcctgcaagaccgccagcggcaccgcgatccccatcgggggcgggagcgccaacgtgtacgtcaacctggccccggtggtgaacgtcggccagaacctcgtggtggacctgtccacgcagatcttctgccacaacgactaccccgagaccatcaccgactacgtcaccctgcagcgcgggagcgcctacggcggcgtgctctccagcttcagcgggacggtgaagtactccggcagctcctaccccttccccaccaccagcgagaccccgcgggtcgtgtacaactcccgcacggacaagccctggcccgtggccctgtacctgacccccgtcagctccgccgggggcgtggcgatcaaggccgggagcctcatcgccgtgctgatcctgcggcagaccaacaactacaactccgacgacttccagttcgtctggaacatctacgcgaacaacgacgtggtggtcccgaccggcggctgcgacgtgagcgcccgcgacgtgacggtcaccctccccgactaccccgggtccgtgcccatcccgctgaccgtgtactgcgccaagagccagaacctgggctactacctctccgggaccacggccgacgccggcaacagcatcttcaccaacaccgcgtccttcagccccgcccagggcgtcggggtgcagctgacccggcagggcacgatcatccccgccgacaacaccgtcagcctgggggccgtgggcacctccgccgtgagcctcgggctgaccgcgaactacgcccgcacgggcggccaggtcaccgccgggaacgtgcagtccatcatcggcgtgaccttcgtctaccagcccggcgacgggaacgccgacgtgaccatcaccgtcaacggcaaggtggtggccaagagcggcgggatgcagatctacgagggcaagctgaccgccgaggggctccgcttcggcatcgtggccagccggttcaaccacgcgctggtcgaccgcctggtggagggggccatcgacgccatcgtgcggcacggcgggcgcgaggaggacatcaccctcgtccgggtgcccggctcctgggagatcccggtggccgccggcgagctggcccgcaaggaggacatcgacgcggtcatcgccatcggggtgctgatccggggcgccacgccccacttcgactacatcgccagcgaggtgtccaaggggctcgcggacctgagcctggagctccgcaagcccatcaccttcggcgtcatcaccgccgacaccctggagcaggccatcgagcgggccgggacgaagcacggcaacaagggctgggaggccgcgctgtccgccatcgagatggccaacctcttcaagagcctgcgctgatgatgaggactagtccctgttcccagagcccacttttttttctttttttgaaataaaatagcctgtctttcagatctaaaaaaaaaaaaaaaaaaaaaaaaaaaaaaaaaaaaaaaaaaaaaaaaaaaaaaaaaaaaaaaaaaaaaaaaaaaaaaaaaaaaaaaaaaaaaaaaaaaa

SEQ ID NO: 1140 - RNA, 1676 nt, synthetic construct
  misc_feature 1..1676: note Artificial____HsIgE(1-18)_Ec(J96)-FimH(22-300_N28S_V48C_L55 C_N91S_N249Q)_Linker-PGDGN_Ec(J96)-FimG(24-37)_Linker-SGG_L umSynth(1-154_C37A_N102D) mRNA opt1
  source 1..1676: mol_type = other RNA
aggagagtcccgcagtcggcgtccagcggctctgcttgttcgtgtgtgtgtcgttgcaggccttattcaagcttaccatggactggacctggatcctgttcctcgtggccgccgcgacccgcgtccacagcttcgcctgcaagaccgccagcggcaccgcgatccccatcgggggcgggagcgccaacgtgtacgtcaacctggccccgtgcgtgaacgtcggccagaactgcgtggtggacctgtccacgcagatcttctgccacaacgactaccccgagaccatcaccgactacgtcaccctgcagcgcgggagcgcctacggcggcgtgctctccagcttcagcgggacggtgaagtactccggcagctcctaccccttccccaccaccagcgagaccccgcgggtcgtgtacaactcccgcacggacaagccctggcccgtggccctgtacctgacccccgtcagctccgccgggggcgtggcgatcaaggccgggagcctcatcgccgtgctgatcctgcggcagaccaacaactacaactccgacgacttccagttcgtctggaacatctacgcgaacaacgacgtggtggtcccgaccggcggctgcgacgtgagcgcccgcgacgtgacggtcaccctccccgactaccccgggtccgtgcccatcccgctgaccgtgtactgcgccaagagccagaacctgggctactacctctccgggaccacggccgacgccggcaacagcatcttcaccaacaccgcgtccttcagccccgcccagggcgtcggggtgcagctgacccggcagggcacgatcatccccgccaacaacaccgtcagcctgggggccgtgggcacctccgccgtgagcctcgggctgaccgcgaactacgcccgcacgggcggccaggtcaccgccgggaacgtgcagtccatcatcggcgtgaccttcgtctaccagcccggcgacgggaacgccgacgtgaccatcaccgtcaacggcaaggtggtggccaagagcggcgggatgcagatctacgagggcaagctgaccgccgaggggctccgcttcggcatcgtggccagccggttcaaccacgcgctggtcgaccgcctggtggagggggccatcgacgccatcgtgcggcacggcgggcgcgaggaggacatcaccctcgtccgggtgcccggctcctgggagatcccggtggccgccggcgagctggcccgcaaggaggacatcgacgcggtcatcgccatcggggtgctgatccggggcgccacgccccacttcgactacatcgccagcgaggtgtccaaggggctcgcggacctgagcctggagctccgcaagcccatcaccttcggcgtcatcaccgccgacaccctggagcaggccatcgagcgggccgggacgaagcacggcaacaagggctgggaggccgcgctgtccgccatcgagatggccaacctcttcaagagcctgcgctgatgatgaggactagtccctgttcccagagcccacttttttttctttttttgaaataaaatagcctgtctttcagatctaaaaaaaaaaaaaaaaaaaaaaaaaaaaaaaaaaaaaaaaaaaaaaaaaaaaaaaaaaaaaaaaaaaaaaaaaaaaaaaaaaaaaaaaaaaaaaaaaaaa

SEQ ID NO: 1141 - RNA, 1676 nt, synthetic construct
  misc_feature 1..1676: note Artificial____HsIgE(1-18)_Ec(J96)-FimH(22-300_F165V)_Linker -PGDGN_Ec(J96)-FimG(24-37)_Linker-SGG_LumSynth(1-154_C37A_N 102D) mRNA opt1
  source 1..1676: mol_type = other RNA
aggagagtcccgcagtcggcgtccagcggctctgcttgttcgtgtgtgtgtcgttgcaggccttattcaagcttaccatggactggacctggatcctgttcctcgtggccgccgcgacccgcgtccacagcttcgcctgcaagaccgccaacggcaccgcgatccccatcgggggcgggagcgccaacgtgtacgtcaacctggccccggtggtgaacgtcggccagaacctcgtggtggacctgtccacgcagatcttctgccacaacgactaccccgagaccatcaccgactacgtcaccctgcagcgcgggagcgcctacggcggcgtgctctccaacttcagcgggacggtgaagtactccggcagctcctaccccttccccaccaccagcgagaccccgcgggtcgtgtacaactcccgcacggacaagccctggcccgtggccctgtacctgacccccgtcagctccgccgggggcgtggcgatcaaggccgggagcctcatcgccgtgctgatcctgcggcagaccaacaactacaactccgacgacttccaggtggtctggaacatctacgcgaacaacgacgtggtggtcccgaccggcggctgcgacgtgagcgcccgcgacgtgacggtcaccctccccgactaccccgggtccgtgcccatcccgctgaccgtgtactgcgccaagagccagaacctgggctactacctctccgggaccacggccgacgccggcaacagcatcttcaccaacaccgcgtccttcagccccgcccagggcgtcggggtgcagctgacccggaacggcacgatcatccccgccaacaacaccgtcagcctgggggccgtgggcacctccgccgtgagcctcgggctgaccgcgaactacgcccgcacgggcggccaggtcaccgccgggaacgtgcagtccatcatcggcgtgaccttcgtctaccagcccggcgacgggaacgccgacgtgaccatcaccgtcaacggcaaggtggtggccaagagcggcgggatgcagatctacgagggcaagctgaccgccgaggggctccgcttcggcatcgtggccagccggttcaaccacgcgctggtcgaccgcctggtggagggggccatcgacgccatcgtgcggcacggcgggcgcgaggaggacatcaccctcgtccgggtgcccggctcctgggagatcccggtggccgccggcgagctggcccgcaaggaggacatcgacgcggtcatcgccatcggggtgctgatccggggcgccacgccccacttcgactacatcgccagcgaggtgtccaaggggctcgcggacctgagcctggagctccgcaagcccatcaccttcggcgtcatcaccgccgacaccctggagcaggccatcgagcgggccgggacgaagcacggcaacaagggctgggaggccgcgctgtccgccatcgagatggccaacctcttcaagagcctgcgctgatgatgaggactagtccctgttcccagagcccacttttttttctttttttgaaataaaatagcctgtctttcagatctaaaaaaaaaaaaaaaaaaaaaaaaaaaaaaaaaaaaaaaaaaaaaaaaaaaaaaaaaaaaaaaaaaaaaaaaaaaaaaaaaaaaaaaaaaaaaaaaaaaa

SEQ ID NO: 1142 - RNA, 1703 nt, synthetic construct
  misc_feature 1..1703: note Artificial____HsIgE(1-18)_Ec(J96)-FimH(22-300_N28S_N91S_N24 9Q)_Linker-PGDGN_Ec(J96)-FimG(24-37)_Linker-SGG_Ferritin(5- 167_N19Q) mRNA opt1
  source 1..1703: mol_type = other RNA
aggagagtcccgcagtcggcgtccagcggctctgcttgttcgtgtgtgtgtcgttgcaggccttattcaagcttaccatggactggacctggatcctgttcctcgtggccgccgcgacccgcgtccacagcttcgcctgcaagaccgccagcggcaccgcgatccccatcgggggcgggagcgccaacgtgtacgtcaacctggccccggtggtgaacgtcggccagaacctcgtggtggacctgtccacgcagatcttctgccacaacgactaccccgagaccatcaccgactacgtcaccctgcagcgcgggagcgcctacggcggcgtgctctccagcttcagcgggacggtgaagtactccggcagctcctaccccttccccaccaccagcgagaccccgcgggtcgtgtacaactcccgcacggacaagccctggcccgtggccctgtacctgacccccgtcagctccgccgggggcgtggcgatcaaggccgggagcctcatcgccgtgctgatcctgcggcagaccaacaactacaactccgacgacttccagttcgtctggaacatctacgcgaacaacgacgtggtggtcccgaccggcggctgcgacgtgagcgcccgcgacgtgacggtcaccctccccgactaccccgggtccgtgcccatcccgctgaccgtgtactgcgccaagagccagaacctgggctactacctctccgggaccacggccgacgccggcaacagcatcttcaccaacaccgcgtccttcagccccgcccagggcgtcggggtgcagctgacccggcagggcacgatcatccccgccaacaacaccgtcagcctgggggccgtgggcacctccgccgtgagcctcgggctgaccgcgaactacgcccgcacgggcggccaggtcaccgccgggaacgtgcagtccatcatcggcgtgaccttcgtctaccagcccggcgacgggaacgccgacgtgaccatcaccgtcaacggcaaggtggtggccaagagcggcggggacatcatcaagctcctgaacgagcaggtcaacaaggagatgcagtccagcaacctgtacatgtccatgagctcctggtgctacacccacagcctcgacggcgccgggctgttcctgttcgaccacgccgcggaggagtacgagcacgccaagaagctcatcatcttcctgaacgagaacaacgtgcccgtgcagctgacctccatcagcgccccggagcacaagttcgagggcctcacgcagatcttccagaaggcctacgagcacgagcagcacatctccgagagcatcaacaacatcgtggaccacgccatcaagtccaaggaccacgcgaccttcaacttcctgcagtggtacgtcgccgagcagcacgaggaggaggtgctgttcaaggacatcctcgacaagatcgagctgatcgggaacgagaaccacggcctgtacctcgccgaccagtacgtgaaggggatcgccaagagccgcaagtcctgatgatgaggactagtccctgttcccagagcccacttttttttctttttttgaaataaaatagcctgtctttcagatctaaaaaaaaaaaaaaaaaaaaaaaaaaaaaaaaaaaaaaaaaaaaaaaaaaaaaaaaaaaaaaaaaaaaaaaaaaaaaaaaaaaaaaaaaaaaaaaaaaaa

SEQ ID NO: 1143 - RNA, 1703 nt, synthetic construct
  misc_feature 1..1703: note Artificial____HsIgE(1-18)_Ec(J96)-FimH(22-300_N28S_N91S_N24 9Q_N256D)_Linker-PGDGN_Ec(J96)-FimG(24-37)_Linker-SGG_Ferri tin(5-167_N19Q) mRNA opt1
  source 1..1703: mol_type = other RNA
aggagagtcccgcagtcggcgtccagcggctctgcttgttcgtgtgtgtgtcgttgcaggccttattcaagcttaccatggactggacctggatcctgttcctcgtggccgccgcgacccgcgtccacagcttcgcctgcaagaccgccagcggcaccgcgatccccatcgggggcgggagcgccaacgtgtacgtcaacctggccccggtggtgaacgtcggccagaacctcgtggtggacctgtccacgcagatcttctgccacaacgactaccccgagaccatcaccgactacgtcaccctgcagcgcgggagcgcctacggcggcgtgctctccagcttcagcgggacggtgaagtactccggcagctcctaccccttccccaccaccagcgagaccccgcgggtcgtgtacaactcccgcacggacaagccctggcccgtggccctgtacctgacccccgtcagctccgccgggggcgtggcgatcaaggccgggagcctcatcgccgtgctgatcctgcggcagaccaacaactacaactccgacgacttccagttcgtctggaacatctacgcgaacaacgacgtggtggtcccgaccggcggctgcgacgtgagcgcccgcgacgtgacggtcaccctccccgactaccccgggtccgtgcccatcccgctgaccgtgtactgcgccaagagccagaacctgggctactacctctccgggaccacggccgacgccggcaacagcatcttcaccaacaccgcgtccttcagccccgcccagggcgtcggggtgcagctgacccggcagggcacgatcatccccgccgacaacaccgtcagcctgggggccgtgggcacctccgccgtgagcctcgggctgaccgcgaactacgcccgcacgggcggccaggtcaccgccgggaacgtgcagtccatcatcggcgtgaccttcgtctaccagcccggcgacgggaacgccgacgtgaccatcaccgtcaacggcaaggtggtggccaagagcggcggggacatcatcaagctcctgaacgagcaggtcaacaaggagatgcagtccagcaacctgtacatgtccatgagctcctggtgctacacccacagcctcgacggcgccgggctgttcctgttcgaccacgccgcggaggagtacgagcacgccaagaagctcatcatcttcctgaacgagaacaacgtgcccgtgcagctgacctccatcagcgccccggagcacaagttcgagggcctcacgcagatcttccagaaggcctacgagcacgagcagcacatctccgagagcatcaacaacatcgtggaccacgccatcaagtccaaggaccacgcgaccttcaacttcctgcagtggtacgtcgccgagcagcacgaggaggaggtgctgttcaaggacatcctcgacaagatcgagctgatcgggaacgagaaccacggcctgtacctcgccgaccagtacgtgaaggggatcgccaagagccgcaagtcctgatgatgaggactagtccctgttcccagagcccacttttttttctttttttgaaataaaatagcctgtctttcagatctaaaaaaaaaaaaaaaaaaaaaaaaaaaaaaaaaaaaaaaaaaaaaaaaaaaaaaaaaaaaaaaaaaaaaaaaaaaaaaaaaaaaaaaaaaaaaaaaaaaa

SEQ ID NO: 1144 - RNA, 1703 nt, synthetic construct
  misc_feature 1..1703: note Artificial____HsIgE(1-18)_Ec(J96)-FimH(22-300_N28S_V48C_L55 C_N91S_N249Q)_Linker-PGDGN_Ec(J96)-FimG(24-37)_Linker-SGG_F erritin(5-167_N19Q) mRNA opt1
  source 1..1703: mol_type = other RNA
aggagagtcccgcagtcggcgtccagcggctctgcttgttcgtgtgtgtgtcgttgcaggccttattcaagcttaccatggactggacctggatcctgttcctcgtggccgccgcgacccgcgtccacagcttcgcctgcaagaccgccagcggcaccgcgatccccatcgggggcgggagcgccaacgtgtacgtcaacctggccccgtgcgtgaacgtcggccagaactgcgtggtggacctgtccacgcagatcttctgccacaacgactaccccgagaccatcaccgactacgtcaccctgcagcgcgggagcgcctacggcggcgtgctctccagcttcagcgggacggtgaagtactccggcagctcctaccccttccccaccaccagcgagaccccgcgggtcgtgtacaactcccgcacggacaagccctggcccgtggccctgtacctgacccccgtcagctccgccgggggcgtggcgatcaaggccgggagcctcatcgccgtgctgatcctgcggcagaccaacaactacaactccgacgacttccagttcgtctggaacatctacgcgaacaacgacgtggtggtcccgaccggcggctgcgacgtgagcgcccgcgacgtgacggtcaccctccccgactaccccgggtccgtgcccatcccgctgaccgtgtactgcgccaagagccagaacctgggctactacctctccgggaccacggccgacgccggcaacagcatcttcaccaacaccgcgtccttcagccccgcccagggcgtcggggtgcagctgacccggcagggcacgatcatccccgccaacaacaccgtcagcctgggggccgtgggcacctccgccgtgagcctcgggctgaccgcgaactacgcccgcacgggcggccaggtcaccgccgggaacgtgcagtccatcatcggcgtgaccttcgtctaccagcccggcgacgggaacgccgacgtgaccatcaccgtcaacggcaaggtggtggccaagagcggcggggacatcatcaagctcctgaacgagcaggtcaacaaggagatgcagtccagcaacctgtacatgtccatgagctcctggtgctacacccacagcctcgacggcgccgggctgttcctgttcgaccacgccgcggaggagtacgagcacgccaagaagctcatcatcttcctgaacgagaacaacgtgcccgtgcagctgacctccatcagcgccccggagcacaagttcgagggcctcacgcagatcttccagaaggcctacgagcacgagcagcacatctccgagagcatcaacaacatcgtggaccacgccatcaagtccaaggaccacgcgaccttcaacttcctgcagtggtacgtcgccgagcagcacgaggaggaggtgctgttcaaggacatcctcgacaagatcgagctgatcgggaacgagaaccacggcctgtacctcgccgaccagtacgtgaaggggatcgccaagagccgcaagtcctgatgatgaggactagtccctgttcccagagcccacttttttttctttttttgaaataaaatagcctgtctttcagatctaaaaaaaaaaaaaaaaaaaaaaaaaaaaaaaaaaaaaaaaaaaaaaaaaaaaaaaaaaaaaaaaaaaaaaaaaaaaaaaaaaaaaaaaaaaaaaaaaaaa

SEQ ID NO: 1145 - RNA, 1703 nt, synthetic construct
  misc_feature 1..1703: note Artificial____HsIgE(1-18)_Ec(J96)-FimH(22-300_F165V)_Linker -PGDGN_Ec(J96)-FimG(24-37)_Linker-SGG_Ferritin(5-167_N19Q) mRNA opt1
  source 1..1703: mol_type = other RNA
aggagagtcccgcagtcggcgtccagcggctctgcttgttcgtgtgtgtgtcgttgcaggccttattcaagcttaccatggactggacctggatcctgttcctcgtggccgccgcgacccgcgtccacagcttcgcctgcaagaccgccaacggcaccgcgatccccatcgggggcgggagcgccaacgtgtacgtcaacctggccccggtggtgaacgtcggccagaacctcgtggtggacctgtccacgcagatcttctgccacaacgactaccccgagaccatcaccgactacgtcaccctgcagcgcgggagcgcctacggcggcgtgctctccaacttcagcgggacggtgaagtactccggcagctcctaccccttccccaccaccagcgagaccccgcgggtcgtgtacaactcccgcacggacaagccctggcccgtggccctgtacctgacccccgtcagctccgccgggggcgtggcgatcaaggccgggagcctcatcgccgtgctgatcctgcggcagaccaacaactacaactccgacgacttccaggtggtctggaacatctacgcgaacaacgacgtggtggtcccgaccggcggctgcgacgtgagcgcccgcgacgtgacggtcaccctccccgactaccccgggtccgtgcccatcccgctgaccgtgtactgcgccaagagccagaacctgggctactacctctccgggaccacggccgacgccggcaacagcatcttcaccaacaccgcgtccttcagccccgcccagggcgtcggggtgcagctgacccggaacggcacgatcatccccgccaacaacaccgtcagcctgggggccgtgggcacctccgccgtgagcctcgggctgaccgcgaactacgcccgcacgggcggccaggtcaccgccgggaacgtgcagtccatcatcggcgtgaccttcgtctaccagcccggcgacgggaacgccgacgtgaccatcaccgtcaacggcaaggtggtggccaagagcggcggggacatcatcaagctcctgaacgagcaggtcaacaaggagatgcagtccagcaacctgtacatgtccatgagctcctggtgctacacccacagcctcgacggcgccgggctgttcctgttcgaccacgccgcggaggagtacgagcacgccaagaagctcatcatcttcctgaacgagaacaacgtgcccgtgcagctgacctccatcagcgccccggagcacaagttcgagggcctcacgcagatcttccagaaggcctacgagcacgagcagcacatctccgagagcatcaacaacatcgtggaccacgccatcaagtccaaggaccacgcgaccttcaacttcctgcagtggtacgtcgccgagcagcacgaggaggaggtgctgttcaaggacatcctcgacaagatcgagctgatcgggaacgagaaccacggcctgtacctcgccgaccagtacgtgaaggggatcgccaagagccgcaagtcctgatgatgaggactagtccctgttcccagagcccacttttttttctttttttgaaataaaatagcctgtctttcagatctaaaaaaaaaaaaaaaaaaaaaaaaaaaaaaaaaaaaaaaaaaaaaaaaaaaaaaaaaaaaaaaaaaaaaaaaaaaaaaaaaaaaaaaaaaaaaaaaaaaa

SEQ ID NO: 1146 - RNA, 980 nt, synthetic construct
  misc_feature 1..980: note Artificial____Ec(J96)-FimC(1-36)_Ec(J96)-FimC(37-241) mRNA opt1
  source 1..980: mol_type = other RNA
aggagagtcccgcagtcggcgtccagcggctctgcttgttcgtgtgtgtgtcgttgcaggccttattcaagcttaccatgagcaacaagaacgtgaacgtccgcaagtcccaggagatcaccttctgcctgctcgccggcatcctgatgttcatggccatgatggtggcggggcgggccgaggccggcgtggccctgggggccacccgcgtcatctaccccgcgggccagaagcaggtccagctcgccgtgacgaacaacgacgagaacagcacctacctgatccagtcctgggtggagaacgccgacggggtgaaggacggccggttcatcgtgaccccgcccctgttcgccatgaagggcaagaaggagaacaccctccgcatcctggacgcgacgaacaaccagctgccccaggaccgggagagcctcttctggatgaacgtcaaggccatcccctccatggacaagagcaagctgaccgagaacaccctgcagctcgccatcatctcccgcatcaagctgtactaccggccggccaagctggccctcccgcccgaccaggcggccgagaagctgcgcttccggcgcagcgccaactccctgaccctcatcaaccccacgccctactacctgaccgtgaccgagctgaacgccgggacccgggtgctcgagaacgccctggtcccgcccatgggcgagagcacggtgaagctgccctccgacgcggggagcaacatcacctaccgcaccatcaacgactacggcgccctcacccccaagatgacgggggtgatggagtgatgatgaggactagtccctgttcccagagcccacttttttttctttttttgaaataaaatagcctgtctttcagatctaaaaaaaaaaaaaaaaaaaaaaaaaaaaaaaaaaaaaaaaaaaaaaaaaaaaaaaaaaaaaaaaaaaaaaaaaaaaaaaaaaaaaaaaaaaaaaaaaaaa

SEQ ID NO: 1147 - RNA, 926 nt, synthetic construct
  misc_feature 1..926: note = Artificial____HsIgE(1-18)_Ec(J96)-FimC(37-241) mRNA opt1
  source 1..926: mol_type = other RNA
aggagagtcccgcagtcggcgtccagcggctctgcttgttcgtgtgtgtgtcgttgcaggccttattcaagcttaccatggactggacctggatcctgttcctcgtggccgccgcgacccgcgtccacagcggcgtggccctgggggccacgcgggtgatctaccccgccggccagaagcaggtccagctggccgtgaccaacaacgacgagaactccacctacctcatccagagctgggtggagaacgcggacggggtcaaggacggccgcttcatcgtgaccccgcccctgttcgccatgaaggggaagaaggagaacacgctgcggatcctcgacgccaccaacaaccagctgccccaggaccgcgagtccctgttctggatgaacgtgaaggccatccccagcatggacaagtccaagctcaccgagaacaccctgcagctggcgatcatcagccggatcaagctctactaccgcccggccaagctggccctgccgcccgaccaggccgccgagaagctccggttccgccggtccgcgaacagcctgacgctgatcaaccccaccccctactacctcaccgtcaccgagctgaacgccggcacgcgcgtgctggagaacgccctcgtgccgcccatgggcgagtccaccgtcaagctgcccagcgacgccgggtccaacatcacctaccggaccatcaacgactacggcgccctgacgcccaagatgaccggggtgatggagtgatgatgaggactagtccctgttcccagagcccacttttttttctttttttgaaataaaatagcctgtctttcagatctaaaaaaaaaaaaaaaaaaaaaaaaaaaaaaaaaaaaaaaaaaaaaaaaaaaaaaaaaaaaaaaaaaaaaaaaaaaaaaaaaaaaaaaaaaaaaaaaaaaa

SEQ ID NO: 1148 - RNA, 1157 nt, synthetic construct
  misc_feature 1..1157: note Artificial____Ec(J96)-FimH(1-21)_Ec(J96)-FimH(22-300) mRNA opt1
  source 1..1157: mol_type = other RNA
aggagagtcccgcagtcggcgtccagcggctctgcttgttcgtgtgtgtgtcgttgcaggccttattcaagcttaccatgaagcgcgtgatcaccctgttcgccgtcctcctgatgggctggagcgtgaacgcctggtccttcgcgtgcaagaccgccaacgggacggccatccccatcggcgggggcagcgccaacgtgtacgtcaacctggccccggtggtgaacgtcgggcagaacctcgtggtggacctgtccacccagatcttctgccacaacgactaccccgagaccatcaccgactacgtcacgctgcagcggggcagcgcgtacggcggggtgctctccaacttcagcggcaccgtgaagtactccgggagctcctaccccttccccaccaccagcgagacgccgcgcgtcgtgtacaactcccggaccgacaagccctggcccgtggccctgtacctgacccccgtcagctccgccggcggggtggccatcaaggcgggcagcctcatcgccgtgctgatcctgcgccagaccaacaactacaactccgacgacttccagttcgtctggaacatctacgccaacaacgacgtggtggtcccgacgggcgggtgcgacgtgagcgcccgggacgtgaccgtcaccctccccgactaccccggctccgtgcccatcccgctgaccgtctactgcgccaagagccagaacctggggtactacctctccggcacgaccgcggacgccggcaacagcatcttcaccaacaccgccagcttctcccccgcccagggggtgggcgtgcagctgacgcgcaacgggaccatcatccccgccaacaacaccgtcagcctgggcgcggtggggacctccgccgtgagcctcggcctgacggccaactacgcccggaccggcgggcaggtcaccgccggcaacgtgcagtccatcatcggggtgaccttcgtctaccagtgatgatgaggactagtccctgttcccagagcccacttttttttctttttttgaaataaaatagcctgtctttcagatctaaaaaaaaaaaaaaaaaaaaaaaaaaaaaaaaaaaaaaaaaaaaaaaaaaaaaaaaaaaaaaaaaaaaaaaaaaaaaaaaaaaaaaaaaaaaaaaaaaaa

SEQ ID NO: 1149 - RNA, 1148 nt, synthetic construct
  misc_feature 1..1148: note = Artificial____HsIgE(1-18)_Ec(J96)-FimH(22-300) mRNA opt1
  source 1..1148: mol_type = other RNA
aggagagtcccgcagtcggcgtccagcggctctgcttgttcgtgtgtgtgtcgttgcaggccttattcaagcttaccatggactggacctggatcctgttcctcgtggccgccgcgacccgcgtccacagcttcgcctgcaagacggccaacggcaccgccatccccatcgggggcgggtccgccaacgtgtacgtgaacctggcgccggtcgtgaacgtgggccagaacctggtcgtggacctcagcacccagatcttctgccacaacgactaccccgagaccatcacggactacgtgaccctgcagcgggggtccgcctacggcggcgtcctgagcaacttctccgggaccgtgaagtacagcggctccagctaccccttccccaccacgtccgagaccccgcgcgtggtctacaacagccggaccgacaagccctggcccgtggccctctacctgacccccgtgtccagcgccgggggcgtcgcgatcaaggccgggtccctgatcgccgtgctcatcctgcgccagacgaacaactacaacagcgacgacttccagttcgtgtggaacatctacgccaacaacgacgtcgtggtgccgaccggcggctgcgacgtctccgcccgggacgtgaccgtgaccctgcccgactaccccgggagcgtccccatcccgctcacggtgtactgcgcgaagtcccagaacctgggctactacctgagcgggaccaccgccgacgccggcaactccatcttcaccaacacggccagcttcagccccgcccagggcgtcggggtgcagctcacccgcaacggcaccatcatccccgcgaacaacaccgtgtccctgggggccgtcggcacgagcgccgtgtccctggggctcaccgccaactacgcccggaccggcggccaggtgaccgcggggaacgtccagagcatcatcggcgtgacgttcgtgtaccagtgatgatgaggactagtccctgttcccagagcccacttttttttctttttttgaaataaaatagcctgtctttcagatctaaaaaaaaaaaaaaaaaaaaaaaaaaaaaaaaaaaaaaaaaaaaaaaaaaaaaaaaaaaaaaaaaaaaaaaaaaaaaaaaaaaaaaaaaaaaaaaaaaaa

SEQ ID NO: 1150 - RNA, 1154 nt, synthetic construct
  misc_feature 1..1154: note = Artificial____MmIgK(1-20)_Ec(J96)-FimH(22-300) mRNA opt1
  source 1..1154: mol_type = other RNA
aggagagtcccgcagtcggcgtccagcggctctgcttgttcgtgtgtgtgtcgttgcaggccttattcaagcttaccatggagaccgacaccctgctcctgtgggtgctgctcctgtgggtccccggcagcacggggttcgcctgcaagaccgccaacggcaccgcgatcccgatcgggggcgggtccgccaacgtgtacgtgaacctggcccccgtcgtgaacgtgggccagaacctcgtcgtggacctgagcacccagatcttctgccacaacgactaccccgagacgatcaccgactacgtgaccctgcagcgcggctccgcctacgggggcgtcctcagcaacttctccgggaccgtgaagtacagcggctccagctaccccttcccgacgacctccgagacgccccgggtggtctacaacagccgcaccgacaagccctggcccgtggccctgtacctgaccccggtgtccagcgccgggggcgtcgcgatcaaggccggctccctcatcgccgtgctgatcctgcggcagaccaacaactacaacagcgacgacttccagttcgtgtggaacatctacgcgaacaacgacgtcgtggtgcccaccgggggctgcgacgtctccgcccgcgacgtgaccgtgacgctccccgactaccccgggagcgtcccgatccccctgaccgtgtactgcgccaagtcccagaacctgggctactacctcagcggcaccaccgccgacgccgggaactccatcttcacgaacaccgcgagcttcagccccgcccagggcgtcggggtgcagctgacccggaacggcaccatcatccccgccaacaacacggtgtccctgggggccgtcggcaccagcgccgtgtccctcggcctgaccgcgaactacgcccgcaccgggggccaggtgacggccgggaacgtccagagcatcatcggcgtgaccttcgtgtaccagtgatgatgaggactagtccctgttcccagagcccacttttttttctttttttgaaataaaatagcctgtctttcagatctaaaaaaaaaaaaaaaaaaaaaaaaaaaaaaaaaaaaaaaaaaaaaaaaaaaaaaaaaaaaaaaaaaaaaaaaaaaaaaaaaaaaaaaaaaaaaaaaaaaa

SEQ ID NO: 1151 - RNA, 1214 nt, synthetic construct
  misc_feature 1..1214: note Artificial____Ec(J96)-FimH(1-21)_Ec(J96)-FimH(22-300)_Linke r-PGDGN_Ec(J96)-FimG(24-37) mRNA opt1
  source 1..1214: mol_type = other RNA
aggagagtcccgcagtcggcgtccagcggctctgcttgttcgtgtgtgtgtcgttgcaggccttattcaagcttaccatgaagcgcgtgatcaccctgttcgccgtcctcctgatgggctggagcgtgaacgcctggtccttcgcgtgcaagaccgccaacgggacggccatccccatcggcgggggcagcgccaacgtgtacgtcaacctggccccggtggtgaacgtcgggcagaacctcgtggtggacctgtccacccagatcttctgccacaacgactaccccgagaccatcaccgactacgtcacgctgcagcggggcagcgcgtacggcggggtgctctccaacttcagcggcaccgtgaagtactccgggagctcctaccccttccccaccaccagcgagacgccgcgcgtcgtgtacaactcccggaccgacaagccctggcccgtggccctgtacctgacccccgtcagctccgccggcggggtggccatcaaggcgggcagcctcatcgccgtgctgatcctgcgccagaccaacaactacaactccgacgacttccagttcgtctggaacatctacgccaacaacgacgtggtggtcccgacgggcgggtgcgacgtgagcgcccgggacgtgaccgtcaccctccccgactaccccggctccgtgcccatcccgctgaccgtctactgcgccaagagccagaacctggggtactacctctccggcacgaccgcggacgccggcaacagcatcttcaccaacaccgccagcttctcccccgcccagggggtgggcgtgcagctgacgcgcaacgggaccatcatccccgccaacaacaccgtcagcctgggcgcggtggggacctccgccgtgagcctcggcctgacggccaactacgcccggaccggcgggcaggtcaccgccggcaacgtgcagtccatcatcggggtgaccttcgtctaccagcccggcgacgggaacgcggacgtgacgatcaccgtgaacggcaaggtcgtggccaagtgatgatgaggactagtccctgttcccagagcccacttttttttctttttttgaaataaaatagcctgtctttcagatctaaaaaaaaaaaaaaaaaaaaaaaaaaaaaaaaaaaaaaaaaaaaaaaaaaaaaaaaaaaaaaaaaaaaaaaaaaaaaaaaaaaaaaaaaaaaaaaaaaaa

SEQ ID NO: 1152 - RNA, 1205 nt, synthetic construct
  misc_feature 1..1205: note Artificial____HsIgE(1-18)_Ec(J96)-FimH(22-300)_Linker-PGDGN _Ec(J96)-FimG(24-37) mRNA opt1
  source 1..1205: mol_type = other RNA
aggagagtcccgcagtcggcgtccagcggctctgcttgttcgtgtgtgtgtcgttgcaggccttattcaagcttaccatggactggacctggatcctgttcctcgtggccgccgcgacccgcgtccacagcttcgcctgcaagacggccaacggcaccgccatccccatcgggggcgggtccgccaacgtgtacgtgaacctggcgccggtcgtgaacgtgggccagaacctggtcgtggacctcagcacccagatcttctgccacaacgactaccccgagaccatcacggactacgtgaccctgcagcgggggtccgcctacggcggcgtcctgagcaacttctccgggaccgtgaagtacagcggctccagctaccccttccccaccacgtccgagaccccgcgcgtggtctacaacagccggaccgacaagccctggcccgtggccctctacctgacccccgtgtccagcgccgggggcgtcgcgatcaaggccgggtccctgatcgccgtgctcatcctgcgccagacgaacaactacaacagcgacgacttccagttcgtgtggaacatctacgccaacaacgacgtcgtggtgccgaccggcggctgcgacgtctccgcccgggacgtgaccgtgaccctgcccgactaccccgggagcgtccccatcccgctcacggtgtactgcgcgaagtcccagaacctgggctactacctgagcgggaccaccgccgacgccggcaactccatcttcaccaacacggccagcttcagccccgcccagggcgtcggggtgcagctcacccgcaacggcaccatcatccccgcgaacaacaccgtgtccctgggggccgtcggcacgagcgccgtgtccctggggctcaccgccaactacgcccggaccggcggccaggtgaccgcggggaacgtccagagcatcatcggcgtgacgttcgtgtaccagcccggggacggcaacgccgacgtcaccatcaccgtgaacgggaaggtggtcgccaagtgatgatgaggactagtccctgttcccagagcccacttttttttctttttttgaaataaaatagcctgtctttcagatctaaaaaaaaaaaaaaaaaaaaaaaaaaaaaaaaaaaaaaaaaaaaaaaaaaaaaaaaaaaaaaaaaaaaaaaaaaaaaaaaaaaaaaaaaaaaaaaaaaaa

SEQ ID NO: 1153 - RNA, 1211 nt, synthetic construct
  misc_feature 1..1211: note Artificial____HsIgE(1-18)_Ec(J96)-FimH(22-300)_Linker-G4SGG _Ec(J96)-FimG(24-37) mRNA opt1
  source 1..1211: mol_type = other RNA
aggagagtcccgcagtcggcgtccagcggctctgcttgttcgtgtgtgtgtcgttgcaggccttattcaagcttaccatggactggacctggatcctgttcctcgtggccgccgcgacccgcgtccacagcttcgcctgcaagacggccaacggcaccgccatccccatcgggggcgggtccgccaacgtgtacgtgaacctggcgccggtcgtgaacgtgggccagaacctggtcgtggacctcagcacccagatcttctgccacaacgactaccccgagaccatcacggactacgtgaccctgcagcgggggtccgcctacggcggcgtcctgagcaacttctccgggaccgtgaagtacagcggctccagctaccccttccccaccacgtccgagaccccgcgcgtggtctacaacagccggaccgacaagccctggcccgtggccctctacctgacccccgtgtccagcgccgggggcgtcgcgatcaaggccgggtccctgatcgccgtgctcatcctgcgccagacgaacaactacaacagcgacgacttccagttcgtgtggaacatctacgccaacaacgacgtcgtggtgccgaccggcggctgcgacgtctccgcccgggacgtgaccgtgaccctgcccgactaccccgggagcgtccccatcccgctcacggtgtactgcgcgaagtcccagaacctgggctactacctgagcgggaccaccgccgacgccggcaactccatcttcaccaacacggccagcttcagccccgcccagggcgtcggggtgcagctcacccgcaacggcaccatcatccccgcgaacaacaccgtgtccctgggggccgtcggcacgagcgccgtgtccctggggctcaccgccaactacgcccggaccggcggccaggtgaccgcggggaacgtccagagcatcatcggcgtgacgttcgtgtaccagggcgggggcgggtccggcggggccgacgtcaccatcaccgtgaacggcaaggtggtcgccaagtgatgatgaggactagtccctgttcccagagcccacttttttttctttttttgaaataaaatagcctgtctttcagatctaaaaaaaaaaaaaaaaaaaaaaaaaaaaaaaaaaaaaaaaaaaaaaaaaaaaaaaaaaaaaaaaaaaaaaaaaaaaaaaaaaaaaaaaaaaaaaaaaaaa

SEQ ID NO: 1154 - RNA, 1211 nt, synthetic construct
  misc_feature 1..1211: note Artificial____MmIgK(1-20)_Ec(J96)-FimH(22-300)_Linker-PGDGN _Ec(J96)-FimG(24-37) mRNA opt1
  source 1..1211: mol_type = other RNA
aggagagtcccgcagtcggcgtccagcggctctgcttgttcgtgtgtgtgtcgttgcaggccttattcaagcttaccatggagaccgacaccctgctcctgtgggtgctgctcctgtgggtccccggcagcacggggttcgcctgcaagaccgccaacggcaccgcgatcccgatcgggggcgggtccgccaacgtgtacgtgaacctggcccccgtcgtgaacgtgggccagaacctcgtcgtggacctgagcacccagatcttctgccacaacgactaccccgagacgatcaccgactacgtgaccctgcagcgcggctccgcctacgggggcgtcctcagcaacttctccgggaccgtgaagtacagcggctccagctaccccttcccgacgacctccgagacgccccgggtggtctacaacagccgcaccgacaagccctggcccgtggccctgtacctgaccccggtgtccagcgccgggggcgtcgcgatcaaggccggctccctcatcgccgtgctgatcctgcggcagaccaacaactacaacagcgacgacttccagttcgtgtggaacatctacgcgaacaacgacgtcgtggtgcccaccgggggctgcgacgtctccgcccgcgacgtgaccgtgacgctccccgactaccccgggagcgtcccgatccccctgaccgtgtactgcgccaagtcccagaacctgggctactacctcagcggcaccaccgccgacgccgggaactccatcttcacgaacaccgcgagcttcagccccgcccagggcgtcggggtgcagctgacccggaacggcaccatcatccccgccaacaacacggtgtccctgggggccgtcggcaccagcgccgtgtccctcggcctgaccgcgaactacgcccgcaccgggggccaggtgacggccgggaacgtccagagcatcatcggcgtgaccttcgtgtaccagccgggggacggcaacgccgacgtcaccatcaccgtgaacggcaaggtggtcgccaagtgatgatgaggactagtccctgttcccagagcccacttttttttctttttttgaaataaaatagcctgtctttcagatctaaaaaaaaaaaaaaaaaaaaaaaaaaaaaaaaaaaaaaaaaaaaaaaaaaaaaaaaaaaaaaaaaaaaaaaaaaaaaaaaaaaaaaaaaaaaaaaaaaaa

SEQ ID NO: 1155 - RNA, 1211 nt, synthetic construct
  misc_feature 1..1211: note Artificial____MmIgK(1-20)_Ec(536)-FimH(22-300)_Linker-PGDGN _Ec(J96)-FimG(24-37) mRNA opt1
  source 1..1211: mol_type = other RNA
aggagagtcccgcagtcggcgtccagcggctctgcttgttcgtgtgtgtgtcgttgcaggccttattcaagcttaccatggagaccgacaccctgctcctgtgggtgctgctcctgtgggtccccggcagcacggggttcgcctgcaagaccgccaacggcaccgcgatcccgatcgggggcgggtccgccaacgtgtacgtgaacctggcccccgccgtcaacgtgggccagaacctcgtggtcgacctgagcacccagatcttctgccacaacgactaccccgagacgatcaccgactacgtgaccctgcagcgcggctccgcctacgggggcgtgctcagctccttcagcgggaccgtcaagtacaacggctccagctaccccttcccgacgacctccgagacgccccgggtggtgtacaacagccgcaccgacaagccctggcccgtcgcgctgtacctgaccccggtgtccagcgccgggggcgtggccatcaaggccggctccctcatcgcggtcctgatcctgcggcagaccaacaactacaacagcgacgacttccagttcgtgtggaacatctacgccaacaacgacgtggtcgtgcccaccgggggctgcgacgtgtccgcccgcgacgtcaccgtgacgctccccgactaccccgggagcgtgccgatccccctgaccgtctactgcgccaagtcccagaacctgggctactacctcagcggcaccaccgccgacgcggggaactccatcttcacgaacaccgccagcttcagccccgcccagggcgtgggggtccagctgacccggaacggcaccatcatccccgccaacaacacggtgtccctgggggccgtgggcaccagcgcggtctccctcggcctgaccgccaactacgcccgcaccgggggccaggtgacggccgggaacgtgcagagcatcatcggcgtcaccttcgtgtaccagccgggggacggcaacgccgacgtgaccatcaccgtcaacggcaaggtggtggcgaagtgatgatgaggactagtccctgttcccagagcccacttttttttctttttttgaaataaaatagcctgtctttcagatctaaaaaaaaaaaaaaaaaaaaaaaaaaaaaaaaaaaaaaaaaaaaaaaaaaaaaaaaaaaaaaaaaaaaaaaaaaaaaaaaaaaaaaaaaaaaaaaaaaaa

SEQ ID NO: 1156 - RNA, 1235 nt, synthetic construct
  misc_feature 1..1235: note Artificial____HsIgE(1-18)_Ec(J96)-FimH(22-300)_Linker-(G4S) 3_Ec(J96)-FimC(135-148) mRNA opt1
  source 1..1235: mol_type = other RNA
aggagagtcccgcagtcggcgtccagcggctctgcttgttcgtgtgtgtgtcgttgcaggccttattcaagcttaccatggactggacctggatcctgttcctcgtggccgccgcgacccgcgtccacagcttcgcctgcaagacggccaacggcaccgccatccccatcgggggcgggtccgccaacgtgtacgtgaacctggcgccggtcgtgaacgtgggccagaacctggtcgtggacctcagcacccagatcttctgccacaacgactaccccgagaccatcacggactacgtgaccctgcagcgggggtccgcctacggcggcgtcctgagcaacttctccgggaccgtgaagtacagcggctccagctaccccttccccaccacgtccgagaccccgcgcgtggtctacaacagccggaccgacaagccctggcccgtggccctctacctgacccccgtgtccagcgccgggggcgtcgcgatcaaggccgggtccctgatcgccgtgctcatcctgcgccagacgaacaactacaacagcgacgacttccagttcgtgtggaacatctacgccaacaacgacgtcgtggtgccgaccggcggctgcgacgtctccgcccgggacgtgaccgtgaccctgcccgactaccccgggagcgtccccatcccgctcacggtgtactgcgcgaagtcccagaacctgggctactacctgagcgggaccaccgccgacgccggcaactccatcttcaccaacacggccagcttcagccccgcccagggcgtcggggtgcagctcacccgcaacggcaccatcatccccgcgaacaacaccgtgtccctgggggccgtcggcacgagcgccgtgtccctggggctcaccgccaactacgcccggaccggcggccaggtgaccgcggggaacgtccagagcatcatcggcgtgacgttcgtgtaccagggcgggggcgggtccggcgggggcgggagcggcgggggcggctccaccgagaacaccctgcagctggccatcatcagccgcatcaagtgatgatgaggactagtccctgttcccagagcccacttttttttctttttttgaaataaaatagcctgtctttcagatctaaaaaaaaaaaaaaaaaaaaaaaaaaaaaaaaaaaaaaaaaaaaaaaaaaaaaaaaaaaaaaaaaaaaaaaaaaaaaaaaaaaaaaaaaaaaaaaaaaaa

SEQ ID NO: 1157 - RNA, 1658 nt, synthetic construct
  misc_feature 1..1658: note Artificial____LumSynth(1-154_C37A_N102D)_Linker(GGS)4-GGG_E c(J96)-FimH(22-300)_Linker-PGDGN_Ec(J96)-FimG(24-37) mRNA opt1
  source 1..1658: mol_type = other RNA
aggagagtcccgcagtcggcgtccagcggctctgcttgttcgtgtgtgtgtcgttgcaggccttattcaagcttaccatgcagatctacgagggcaagctgaccgccgaggggctccgcttcggcatcgtggccagccggttcaaccacgcgctggtcgaccgcctggtggagggggccatcgacgccatcgtgcggcacggcgggcgcgaggaggacatcaccctcgtccgggtgcccggctcctgggagatcccggtggccgccggcgagctggcgcgcaaggaggacatcgacgccgtcatcgccatcggggtgctgatccggggcgccacgccccacttcgactacatcgcgagcgaggtgtccaaggggctcgccgacctgagcctggagctccgcaagcccatcaccttcggcgtcatcaccgccgacaccctggagcaggccatcgagcgggccgggacgaagcacggcaacaagggctgggaggcggccctgtccgccatcgagatggccaacctcttcaagagcctgcgcgggggctccgggggcagcggcgggtccggcgggagcggcgggggcttcgcctgcaagaccgcgaacggcaccgccatccccatcgggggcgggtccgccaacgtgtacgtgaacctggccccggtcgtgaacgtgggccagaacctcgtcgtggacctgagcacccagatcttctgccacaacgactaccccgagacgatcaccgactacgtgaccctgcagcgggggtccgcctacggcggcgtcctcagcaacttctccgggaccgtgaagtacagcggctccagctaccccttccccacgacctccgagaccccgcgcgtggtctacaacagccggaccgacaagccctggcccgtggcgctgtacctgacgcccgtgagctccgccgggggcgtcgccatcaaggccgggagcctcatcgccgtgctgatcctgcgccagaccaacaactacaactccgacgacttccagttcgtctggaacatctacgcgaacaacgacgtggtggtcccgaccggcggctgcgacgtgagcgcccgggacgtgaccgtcacgctccccgactaccccgggtccgtgcccatcccgctgaccgtgtactgcgccaagagccagaacctgggctactacctctccgggaccaccgccgacgcgggcaacagcatcttcacgaacaccgcctccttcagccccgcccagggcgtcggggtgcagctgacccgcaacggcaccatcatccccgccaacaacacggtgtccctgggggccgtcggcaccagcgcggtgtccctcgggctgaccgccaactacgcccggaccggcggccaggtgacggccgggaacgtccagagcatcatcggcgtgaccttcgtgtaccagcccggggacggcaacgccgacgtcaccatcaccgtgaacgggaaggtggtcgcgaagtgatgatgaggactagtccctgttcccagagcccacttttttttctttttttgaaataaaatagcctgtctttcagatctaaaaaaaaaaaaaaaaaaaaaaaaaaaaaaaaaaaaaaaaaaaaaaaaaaaaaaaaaaaaaaaaaaaaaaaaaaaaaaaaaaaaaaaaaaaaaaaaaaaa

SEQ ID NO: 1158 - RNA, 1676 nt, synthetic construct
  misc_feature 1..1676: note Artificial____HsIgE(1-18)_Ec(J96)-FimH(22-300)_Linker-PGDGN _Ec(J96)-FimG(24-37)_Linker-SGG_LumSynth(1-154_C37A_N102D) mRNA opt1
  source 1..1676: mol_type = other RNA
aggagagtcccgcagtcggcgtccagcggctctgcttgttcgtgtgtgtgtcgttgcaggccttattcaagcttaccatggactggacctggatcctgttcctcgtggccgccgcgacccgcgtccacagcttcgcctgcaagacggccaacggcaccgccatccccatcgggggcgggtccgccaacgtgtacgtgaacctggcgccggtcgtgaacgtgggccagaacctggtcgtggacctcagcacccagatcttctgccacaacgactaccccgagaccatcacggactacgtgaccctgcagcgggggtccgcctacggcggcgtcctgagcaacttctccgggaccgtgaagtacagcggctccagctaccccttccccaccacgtccgagaccccgcgcgtggtctacaacagccggaccgacaagccctggcccgtggccctctacctgacccccgtgtccagcgccgggggcgtcgcgatcaaggccgggtccctgatcgccgtgctcatcctgcgccagacgaacaactacaacagcgacgacttccagttcgtgtggaacatctacgccaacaacgacgtcgtggtgccgaccggcggctgcgacgtctccgcccgggacgtgaccgtgaccctgcccgactaccccgggagcgtccccatcccgctcacggtgtactgcgcgaagtcccagaacctgggctactacctgagcgggaccaccgccgacgccggcaactccatcttcaccaacacggccagcttcagccccgcccagggcgtcggggtgcagctcacccgcaacggcaccatcatccccgcgaacaacaccgtgtccctgggggccgtcggcacgagcgccgtgtccctggggctcaccgccaactacgcccggaccggcggccaggtgaccgcggggaacgtccagagcatcatcggcgtgacgttcgtgtaccagcccggggacggcaacgccgacgtcaccatcaccgtgaacgggaaggtggtcgccaagtccggcggcatgcagatctacgaggggaagctgaccgccgagggcctgcgcttcgggatcgtggccagccggttcaaccacgcgctcgtggaccgcctggtcgagggcgccatcgacgccatcgtgcggcacgggggccgcgaggaggacatcacgctggtgcgggtcccgggctcctgggagatccccgtggccgcgggggagctcgcccgcaaggaggacatcgacgccgtgatcgccatcggcgtcctgatccgcggggccacgccccacttcgactacatcgcgagcgaggtgtccaagggcctggccgacctcagcctggagctgcggaagcccatcaccttcggcgtgatcaccgccgacaccctcgagcaggccatcgagcgggccgggaccaagcacggcaacaaggggtgggaggcggccctgtccgccatcgagatggccaacctgttcaagagcctccgctgatgatgaggactagtccctgttcccagagcccacttttttttctttttttgaaataaaatagcctgtctttcagatctaaaaaaaaaaaaaaaaaaaaaaaaaaaaaaaaaaaaaaaaaaaaaaaaaaaaaaaaaaaaaaaaaaaaaaaaaaaaaaaaaaaaaaaaaaaaaaaaaaaa

SEQ ID NO: 1159 - RNA, 1703 nt, synthetic construct
  misc_feature 1..1703: note Artificial____HsIgE(1-18)_Ec(J96)-FimH(22-300)_Linker-PGDGN _Ec(J96)-FimG(24-37)_Linker-SGG_Ferritin(5-167_N19Q) mRNA opt1
  source 1..1703: mol_type = other RNA
aggagagtcccgcagtcggcgtccagcggctctgcttgttcgtgtgtgtgtcgttgcaggccttattcaagcttaccatggactggacctggatcctgttcctcgtggccgccgcgacccgcgtccacagcttcgcctgcaagacggccaacggcaccgccatccccatcgggggcgggtccgccaacgtgtacgtgaacctggcgccggtcgtgaacgtgggccagaacctggtcgtggacctcagcacccagatcttctgccacaacgactaccccgagaccatcacggactacgtgaccctgcagcgggggtccgcctacggcggcgtcctgagcaacttctccgggaccgtgaagtacagcggctccagctaccccttccccaccacgtccgagaccccgcgcgtggtctacaacagccggaccgacaagccctggcccgtggccctctacctgacccccgtgtccagcgccgggggcgtcgcgatcaaggccgggtccctgatcgccgtgctcatcctgcgccagacgaacaactacaacagcgacgacttccagttcgtgtggaacatctacgccaacaacgacgtcgtggtgccgaccggcggctgcgacgtctccgcccgggacgtgaccgtgaccctgcccgactaccccgggagcgtccccatcccgctcacggtgtactgcgcgaagtcccagaacctgggctactacctgagcgggaccaccgccgacgccggcaactccatcttcaccaacacggccagcttcagccccgcccagggcgtcggggtgcagctcacccgcaacggcaccatcatccccgcgaacaacaccgtgtccctgggggccgtcggcacgagcgccgtgtccctggggctcaccgccaactacgcccggaccggcggccaggtgaccgcggggaacgtccagagcatcatcggcgtgacgttcgtgtaccagcccggggacggcaacgccgacgtcaccatcaccgtgaacgggaaggtggtcgccaagtccggcggcgacatcatcaagctgctgaacgagcaggtcaacaaggagatgcagagctccaacctctacatgagcatgtccagctggtgctacacccactccctggacggggccggcctgttcctcttcgaccacgccgcggaggagtacgagcacgccaagaagctgatcatcttcctgaacgagaacaacgtgccggtgcagctcacgagcatctccgcccccgagcacaagttcgaggggctgacccagatcttccagaaggcctacgagcacgagcagcacatcagcgagtccatcaacaacatcgtggaccacgcgatcaagagcaaggaccacgccaccttcaacttcctgcagtggtacgtggccgagcagcacgaggaggaggtcctcttcaaggacatcctggacaagatcgagctgatcggcaacgagaaccacgggctctacctggccgaccagtacgtgaagggcatcgccaagtcccgcaagagctgatgatgaggactagtccctgttcccagagcccacttttttttctttttttgaaataaaatagcctgtctttcagatctaaaaaaaaaaaaaaaaaaaaaaaaaaaaaaaaaaaaaaaaaaaaaaaaaaaaaaaaaaaaaaaaaaaaaaaaaaaaaaaaaaaaaaaaaaaaaaaaaaaa

SEQ ID NO: 1160 - RNA, 1733 nt, synthetic construct
  misc_feature 1..1733: note Artificial____MmIgK(1-20)_Ec(J96)-FimH(22-300)_Linker-PGDGN _Ec(J96)-FimG(24-37)_Linker-(GGS)4_Ferritin(5-166) mRNA opt1
  source 1..1733: mol_type = other RNA
aggagagtcccgcagtcggcgtccagcggctctgcttgttcgtgtgtgtgtcgttgcaggccttattcaagcttaccatggagaccgacaccctgctcctgtgggtgctgctcctgtgggtccccggcagcacggggttcgcctgcaagaccgccaacggcaccgcgatcccgatcgggggcgggtccgccaacgtgtacgtgaacctggcccccgtcgtgaacgtgggccagaacctcgtcgtggacctgagcacccagatcttctgccacaacgactaccccgagacgatcaccgactacgtgaccctgcagcgcggctccgcctacgggggcgtcctcagcaacttctccgggaccgtgaagtacagcggctccagctaccccttcccgacgacctccgagacgccccgggtggtctacaacagccgcaccgacaagccctggcccgtggccctgtacctgaccccggtgtccagcgccgggggcgtcgcgatcaaggccggctccctcatcgccgtgctgatcctgcggcagaccaacaactacaacagcgacgacttccagttcgtgtggaacatctacgcgaacaacgacgtcgtggtgcccaccgggggctgcgacgtctccgcccgcgacgtgaccgtgacgctccccgactaccccgggagcgtcccgatccccctgaccgtgtactgcgccaagtcccagaacctgggctactacctcagcggcaccaccgccgacgccgggaactccatcttcacgaacaccgcgagcttcagccccgcccagggcgtcggggtgcagctgacccggaacggcaccatcatccccgccaacaacacggtgtccctgggggccgtcggcaccagcgccgtgtccctcggcctgaccgcgaactacgcccgcaccgggggccaggtgacggccgggaacgtccagagcatcatcggcgtgaccttcgtgtaccagccgggggacggcaacgccgacgtcaccatcaccgtgaacggcaaggtggtcgccaagggcgggtccgggggcagcgggggctccggcgggagcgacatcatcaagctgctcaacgagcaggtcaacaaggagatgaactccagcaacctgtacatgtccatgagctcctggtgctacacgcacagcctggacggcgcgggcctcttcctgttcgaccacgccgccgaggagtacgagcacgccaagaagctgatcatcttcctcaacgagaacaacgtgcccgtgcagctgacctccatcagcgcccccgagcacaagttcgaggggctgacccagatcttccagaaggcgtacgagcacgagcagcacatctccgagagcatcaacaacatcgtggaccacgccatcaagtccaaggaccacgccaccttcaacttcctccagtggtacgtggccgagcagcacgaggaggaggtcctgttcaaggacatcctggacaagatcgagctcatcggcaacgagaaccacgggctgtacctggcggaccagtacgtgaagggcatcgccaagagccggaagtgatgatgaggactagtccctgttcccagagcccacttttttttctttttttgaaataaaatagcctgtctttcagatctaaaaaaaaaaaaaaaaaaaaaaaaaaaaaaaaaaaaaaaaaaaaaaaaaaaaaaaaaaaaaaaaaaaaaaaaaaaaaaaaaaaaaaaaaaaaaaaaaaaa

SEQ ID NO: 1161 - RNA, 1376 nt, synthetic construct
  misc_feature 1..1376: note Artificial____HsIgE(1-18)_Ec(J96)-FimH(22-300)_Linker-PGDGN _Ec(J96)-FimG(24-37)_TMdomain-HA(510-566) mRNA opt1
  source 1..1376: mol_type = other RNA
aggagagtcccgcagtcggcgtccagcggctctgcttgttcgtgtgtgtgtcgttgcaggccttattcaagcttaccatggactggacctggatcctgttcctcgtggccgccgcgacccgcgtccacagcttcgcctgcaagacggccaacggcaccgccatccccatcgggggcgggtccgccaacgtgtacgtgaacctggcgccggtcgtgaacgtgggccagaacctggtcgtggacctcagcacccagatcttctgccacaacgactaccccgagaccatcacggactacgtgaccctgcagcgggggtccgcctacggcggcgtcctgagcaacttctccgggaccgtgaagtacagcggctccagctaccccttccccaccacgtccgagaccccgcgcgtggtctacaacagccggaccgacaagccctggcccgtggccctctacctgacccccgtgtccagcgccgggggcgtcgcgatcaaggccgggtccctgatcgccgtgctcatcctgcgccagacgaacaactacaacagcgacgacttccagttcgtgtggaacatctacgccaacaacgacgtcgtggtgccgaccggcggctgcgacgtctccgcccgggacgtgaccgtgaccctgcccgactaccccgggagcgtccccatcccgctcacggtgtactgcgcgaagtcccagaacctgggctactacctgagcgggaccaccgccgacgccggcaactccatcttcaccaacacggccagcttcagccccgcccagggcgtcggggtgcagctcacccgcaacggcaccatcatccccgcgaacaacaccgtgtccctgggggccgtcggcacgagcgccgtgtccctggggctcaccgccaactacgcccggaccggcggccaggtgaccgcggggaacgtccagagcatcatcggcgtgacgttcgtgtaccagcccggggacggcaacgccgacgtcaccatcaccgtgaacgggaaggtggtcgccaaggccaagctgaaccgcgaggagatcgacggcgtgaagctggagtccacccggatctaccagatcctcgccatctacagcacggtggcgtccagcctggtcctggtggtgtccctcggcgccatcagcttctggatgtgctccaacgggagcctgcagtgccgcatctgcatctgatgatgaggactagtccctgttcccagagcccacttttttttctttttttgaaataaaatagcctgtctttcagatctaaaaaaaaaaaaaaaaaaaaaaaaaaaaaaaaaaaaaaaaaaaaaaaaaaaaaaaaaaaaaaaaaaaaaaaaaaaaaaaaaaaaaaaaaaaaaaaaaaaa

SEQ ID NO: 1162 - RNA, 1709 nt, synthetic construct
  misc_feature 1..1709: note Artificial____HsIgE(1-18)_LumSynth(1-154_C37A_N102D)_Linker (GGS)4-GGG_Ec(J96)-FimH(22-300)_Linker-PGDGN_Ec(J96)-FimG(2 4-37) mRNA opt1
  source 1..1709: mol_type = other RNA
aggagagtcccgcagtcggcgtccagcggctctgcttgttcgtgtgtgtgtcgttgcaggccttattcaagcttaccatggactggacctggatcctgttcctcgtggccgccgcgacccgcgtccacagccagatctacgagggcaagctgacggccgaggggctgcggttcggcatcgtggcctcccgcttcaaccacgccctcgtggaccggctggtcgagggggccatcgacgcgatcgtgcgccacggcgggcgggaggaggacatcaccctggtgcgcgtccccggcagctgggagatcccggtggccgccggcgagctcgcccggaaggaggacatcgacgcggtgatcgccatcggggtcctgatccgcggcgccacgccccacttcgactacatcgcctccgaggtgagcaaggggctggccgacctctccctggagctgcggaagcccatcaccttcggcgtgatcaccgcggacaccctcgagcaggccatcgagcgcgccgggaccaagcacggcaacaagggctgggaggccgccctgagcgcgatcgagatggccaacctgttcaagtccctccgcgggggcagcgggggctccggcgggagcggcgggtccggcgggggcttcgcctgcaagaccgccaacggcacggccatccccatcgggggcgggagcgcgaacgtctacgtgaacctggccccggtggtcaacgtgggccagaacctggtggtcgacctctccacccagatcttctgccacaacgactaccccgagaccatcaccgactacgtgacgctgcagcgggggagcgcctacggcggcgtgctgtccaacttcagcgggaccgtcaagtactccggcagctcctaccccttccccaccaccagcgagacgccgcgggtggtgtacaacagccgcaccgacaagccctggcccgtcgccctctacctgacccccgtgtccagcgccgggggcgtcgcgatcaaggccgggtccctgatcgccgtgctcatcctgcggcagaccaacaactacaacagcgacgacttccagttcgtgtggaacatctacgccaacaacgacgtcgtggtgccgacgggcggctgcgacgtctccgcgcgcgacgtgaccgtgaccctgcccgactaccccgggagcgtccccatcccgctcaccgtgtactgcgccaagtcccagaacctgggctactacctgagcgggacgaccgccgacgccggcaactccatcttcaccaacaccgccagcttctcccccgcgcagggcgtgggggtccagctcacgcggaacggcaccatcatccccgccaacaacaccgtgagcctgggggccgtgggcacctccgccgtcagcctggggctcacggccaactacgcgcgcaccggcggccaggtgaccgccgggaacgtgcagtccatcatcggcgtcaccttcgtgtaccagcccggggacggcaacgccgacgtgacgatcaccgtcaacgggaaggtggtggccaagtgatgatgaggactagtccctgttcccagagcccacttttttttctttttttgaaataaaatagcctgtctttcagatctaaaaaaaaaaaaaaaaaaaaaaaaaaaaaaaaaaaaaaaaaaaaaaaaaaaaaaaaaaaaaaaaaaaaaaaaaaaaaaaaaaaaaaaaaaaaaaaaaaaa

SEQ ID NO: 1163 - RNA, 1676 nt, synthetic construct
  misc_feature 1..1676: note Artificial____HsIgE(1-18)_Ec(J96)-FimH(22-300_N28S_N91S_N24 9Q)_Linker-PGDGN_Ec(J96)-FimG(24-37)_Linker-SGG_LumSynth(1- 154_C37A_N102D) mRNA opt1
  source 1..1676: mol_type = other RNA
aggagagtcccgcagtcggcgtccagcggctctgcttgttcgtgtgtgtgtcgttgcaggccttattcaagcttaccatggactggacctggatcctgttcctcgtggccgccgcgacccgcgtccacagcttcgcctgcaagacggcctccggcaccgccatccccatcgggggcgggagcgccaacgtgtacgtgaacctggcgccggtcgtgaacgtgggccagaacctggtcgtggacctctccacccagatcttctgccacaacgactaccccgagaccatcacggactacgtgaccctgcagcgggggagcgcctacggcggcgtcctgtccagcttctccgggaccgtgaagtacagcggctccagctaccccttccccaccacgtccgagaccccgcgcgtggtctacaacagccggaccgacaagccctggcccgtggccctctacctgacccccgtgtccagcgccgggggcgtcgcgatcaaggccgggtccctgatcgccgtgctcatcctgcgccagacgaacaactacaacagcgacgacttccagttcgtgtggaacatctacgccaacaacgacgtcgtggtgccgaccggcggctgcgacgtctccgcccgggacgtgaccgtgaccctgcccgactaccccgggagcgtccccatcccgctcacggtgtactgcgcgaagtcccagaacctgggctactacctgagcgggaccaccgccgacgccggcaacagcatcttcaccaacacggcctccttcagccccgcccagggcgtcggggtgcagctcacccgccagggcaccatcatccccgcgaacaacaccgtgtccctgggggccgtcggcacgagcgccgtgtccctggggctcaccgccaactacgcccggaccggcggccaggtgaccgcggggaacgtccagagcatcatcggcgtgacgttcgtgtaccagcccggggacggcaacgccgacgtcaccatcaccgtgaacgggaaggtggtcgccaagtccggcggcatgcagatctacgaggggaagctgaccgccgagggcctgcgcttcgggatcgtggccagccggttcaaccacgcgctcgtggaccgcctggtcgagggcgccatcgacgccatcgtgcggcacgggggccgcgaggaggacatcacgctggtgcgggtcccgggctcctgggagatccccgtggccgcgggggagctcgcccgcaaggaggacatcgacgccgtgatcgccatcggcgtcctgatccgcggggccacgccccacttcgactacatcgcgagcgaggtgtccaagggcctggccgacctcagcctggagctgcggaagcccatcaccttcggcgtgatcaccgccgacaccctcgagcaggccatcgagcgggccgggaccaagcacggcaacaaggggtgggaggcggccctgtccgccatcgagatggccaacctgttcaagagcctccgctgatgatgaggactagtccctgttcccagagcccacttttttttctttttttgaaataaaatagcctgtctttcagatctaaaaaaaaaaaaaaaaaaaaaaaaaaaaaaaaaaaaaaaaaaaaaaaaaaaaaaaaaaaaaaaaaaaaaaaaaaaaaaaaaaaaaaaaaaaaaaaaaaaa

SEQ ID NO: 1164 - RNA, 1676 nt, synthetic construct
  misc_feature 1..1676: note Artificial____HsIgE(1-18)_Ec(J96)-FimH(22-300_N28S_N91S_N24 9Q_N256D)_Linker-PGDGN_Ec(J96)-FimG(24-37)_Linker-SGG_LumSy nth(1-154_C37A_N102D) mRNA opt1
  source 1..1676: mol_type = other RNA
aggagagtcccgcagtcggcgtccagcggctctgcttgttcgtgtgtgtgtcgttgcaggccttattcaagcttaccatggactggacctggatcctgttcctcgtggccgccgcgacccgcgtccacagcttcgcctgcaagacggcctccggcaccgccatccccatcgggggcgggagcgccaacgtgtacgtgaacctggcgccggtcgtgaacgtgggccagaacctggtcgtggacctctccacccagatcttctgccacaacgactaccccgagaccatcacggactacgtgaccctgcagcgggggagcgcctacggcggcgtcctgtccagcttctccgggaccgtgaagtacagcggctccagctaccccttccccaccacgtccgagaccccgcgcgtggtctacaacagccggaccgacaagccctggcccgtggccctctacctgacccccgtgtccagcgccgggggcgtcgcgatcaaggccgggtccctgatcgccgtgctcatcctgcgccagacgaacaactacaacagcgacgacttccagttcgtgtggaacatctacgccaacaacgacgtcgtggtgccgaccggcggctgcgacgtctccgcccgggacgtgaccgtgaccctgcccgactaccccgggagcgtccccatcccgctcacggtgtactgcgcgaagtcccagaacctgggctactacctgagcgggaccaccgccgacgccggcaacagcatcttcaccaacacggcctccttcagccccgcccagggcgtcggggtgcagctcacccgccagggcaccatcatccccgcggacaacaccgtgtccctgggggccgtcggcacgagcgccgtgtccctggggctcaccgccaactacgcccggaccggcggccaggtgaccgcggggaacgtccagagcatcatcggcgtgacgttcgtgtaccagcccggggacggcaacgccgacgtcaccatcaccgtgaacgggaaggtggtcgccaagtccggcggcatgcagatctacgaggggaagctgaccgccgagggcctgcgcttcgggatcgtggccagccggttcaaccacgcgctcgtggaccgcctggtcgagggcgccatcgacgccatcgtgcggcacgggggccgcgaggaggacatcacgctggtgcgggtcccgggctcctgggagatccccgtggccgcgggggagctcgcccgcaaggaggacatcgacgccgtgatcgccatcggcgtcctgatccgcggggccacgccccacttcgactacatcgcgagcgaggtgtccaagggcctggccgacctcagcctggagctgcggaagcccatcaccttcggcgtgatcaccgccgacaccctcgagcaggccatcgagcgggccgggaccaagcacggcaacaaggggtgggaggcggccctgtccgccatcgagatggccaacctgttcaagagcctccgctgatgatgaggactagtccctgttcccagagcccacttttttttctttttttgaaataaaatagcctgtctttcagatctaaaaaaaaaaaaaaaaaaaaaaaaaaaaaaaaaaaaaaaaaaaaaaaaaaaaaaaaaaaaaaaaaaaaaaaaaaaaaaaaaaaaaaaaaaaaaaaaaaaa

SEQ ID NO: 1165 - RNA, 1676 nt, synthetic construct
  misc_feature 1..1676: note Artificial____HsIgE(1-18)_Ec(J96)-FimH(22-300_N28S_V48C_L55 C_N91S_N249Q)_Linker-PGDGN_Ec(J96)-FimG(24-37)_Linker-SGG_L umSynth(1-154_C37A_N102D) mRNA opt1
  source 1..1676: mol_type = other RNA
aggagagtcccgcagtcggcgtccagcggctctgcttgttcgtgtgtgtgtcgttgcaggccttattcaagcttaccatggactggacctggatcctgttcctcgtggccgccgcgacccgcgtccacagcttcgcctgcaagacggcctccggcaccgccatccccatcgggggcgggagcgccaacgtgtacgtgaacctggcgccgtgcgtcaacgtgggccagaactgcgtggtcgacctgtccacccagatcttctgccacaacgactaccccgagaccatcacggactacgtgaccctccagcgggggagcgcctacggcggcgtgctgtccagcttctccgggaccgtcaagtacagcggctccagctaccccttccccaccacgtccgagaccccgcgcgtggtgtacaacagccggaccgacaagccctggcccgtcgccctgtacctcacccccgtgtccagcgccgggggcgtggcgatcaaggccgggtccctgatcgccgtcctgatcctccgccagacgaacaactacaacagcgacgacttccagttcgtgtggaacatctacgccaacaacgacgtggtcgtgccgaccggcggctgcgacgtgtccgcccgggacgtcaccgtgaccctgcccgactaccccgggagcgtgcccatcccgctgacggtctactgcgcgaagtcccagaacctcggctactacctgagcgggaccaccgccgacgccggcaacagcatcttcaccaacacggcctccttcagccccgcccagggcgtgggggtccagctgacccgccagggcaccatcatccccgcgaacaacaccgtgtccctcggggccgtgggcacgagcgccgtctccctggggctgaccgccaactacgcccggaccggcggccaggtgaccgcggggaacgtgcagagcatcatcggcgtcacgttcgtgtaccagcccggggacggcaacgccgacgtgaccatcaccgtcaacgggaaggtggtggccaagtccggcggcatgcagatctacgaggggaagctcaccgccgagggcctgcgcttcgggatcgtcgccagccggttcaaccacgcgctggtggaccgcctcgtggagggcgccatcgacgccatcgtccggcacgggggccgcgaggaggacatcacgctggtgcgggtgccgggctcctgggagatccccgtcgccgcgggggagctggcccgcaaggaggacatcgacgccgtgatcgccatcggcgtgctcatccgcggggccacgccccacttcgactacatcgcgagcgaggtctccaagggcctggccgacctgagcctcgagctgcggaagcccatcaccttcggcgtgatcaccgccgacaccctggagcaggccatcgagcgggccgggaccaagcacggcaacaaggggtgggaggcggccctctccgccatcgagatggccaacctgttcaagagcctgcgctgatgatgaggactagtccctgttcccagagcccacttttttttctttttttgaaataaaatagcctgtctttcagatctaaaaaaaaaaaaaaaaaaaaaaaaaaaaaaaaaaaaaaaaaaaaaaaaaaaaaaaaaaaaaaaaaaaaaaaaaaaaaaaaaaaaaaaaaaaaaaaaaaaa

SEQ ID NO: 1166 - RNA, 1676 nt, synthetic construct
  misc_feature 1..1676: note Artificial____HsIgE(1-18)_Ec(J96)-FimH(22-300_F165V)_Linker -PGDGN_Ec(J96)-FimG(24-37)_Linker-SGG_LumSynth(1-154_C37A_N 102D) mRNA opt1
  source 1..1676: mol_type = other RNA
aggagagtcccgcagtcggcgtccagcggctctgcttgttcgtgtgtgtgtcgttgcaggccttattcaagcttaccatggactggacctggatcctgttcctcgtggccgccgcgacccgcgtccacagcttcgcctgcaagacggccaacggcaccgccatccccatcgggggcgggtccgccaacgtgtacgtgaacctggcgccggtcgtgaacgtgggccagaacctggtcgtggacctcagcacccagatcttctgccacaacgactaccccgagaccatcacggactacgtgaccctgcagcgggggtccgcctacggcggcgtcctgagcaacttctccgggaccgtgaagtacagcggctccagctaccccttccccaccacgtccgagaccccgcgcgtggtctacaacagccggaccgacaagccctggcccgtggccctctacctgacccccgtgtccagcgccgggggcgtcgcgatcaaggccgggtccctgatcgccgtgctcatcctgcgccagacgaacaactacaacagcgacgacttccaggtggtctggaacatctacgccaacaacgacgtggtggtcccgaccggcggctgcgacgtgtccgcccgggacgtgaccgtcaccctgcccgactaccccgggagcgtgcccatcccgctcacggtctactgcgcgaagtcccagaacctgggctactacctgagcgggaccaccgccgacgccggcaactccatcttcaccaacacggccagcttcagccccgcccagggcgtgggggtgcagctcacccgcaacggcaccatcatccccgcgaacaacaccgtctccctgggggccgtgggcacgagcgccgtgtccctggggctcaccgccaactacgcccggaccggcggccaggtcaccgcggggaacgtgcagagcatcatcggcgtgacgttcgtctaccagcccggggacggcaacgccgacgtgaccatcaccgtgaacgggaaggtcgtggccaagtccggcggcatgcagatctacgaggggaagctgaccgccgagggcctgcgcttcgggatcgtggccagccggttcaaccacgcgctcgtcgaccgcctggtggagggcgccatcgacgccatcgtgcggcacgggggccgcgaggaggacatcacgctggtccgggtgccgggctcctgggagatccccgtggccgcgggggagctcgcccgcaaggaggacatcgacgccgtcatcgccatcggcgtgctgatccgcggggccacgccccacttcgactacatcgcgagcgaggtgtccaagggcctggccgacctcagcctggagctgcggaagcccatcaccttcggcgtcatcaccgccgacaccctcgagcaggccatcgagcgggccgggaccaagcacggcaacaaggggtgggaggcggccctgtccgccatcgagatggccaacctgttcaagagcctccgctgatgatgaggactagtccctgttcccagagcccacttttttttctttttttgaaataaaatagcctgtctttcagatctaaaaaaaaaaaaaaaaaaaaaaaaaaaaaaaaaaaaaaaaaaaaaaaaaaaaaaaaaaaaaaaaaaaaaaaaaaaaaaaaaaaaaaaaaaaaaaaaaaaa

SEQ ID NO: 1167 - RNA, 1703 nt, synthetic construct
  misc_feature 1..1703: note Artificial____HsIgE(1-18)_Ec(J96)-FimH(22-300_N28S_N91S_N24 9Q)_Linker-PGDGN_Ec(J96)-FimG(24-37)_Linker-SGG_Ferritin(5- 167_N19Q) mRNA opt1
  source 1..1703: mol_type = other RNA
aggagagtcccgcagtcggcgtccagcggctctgcttgttcgtgtgtgtgtcgttgcaggccttattcaagcttaccatggactggacctggatcctgttcctcgtggccgccgcgacccgcgtccacagcttcgcctgcaagacggcctccggcaccgccatccccatcgggggcgggagcgccaacgtgtacgtgaacctggcgccggtcgtgaacgtgggccagaacctggtcgtggacctctccacccagatcttctgccacaacgactaccccgagaccatcacggactacgtgaccctgcagcgggggagcgcctacggcggcgtcctgtccagcttctccgggaccgtgaagtacagcggctccagctaccccttccccaccacgtccgagaccccgcgcgtggtctacaacagccggaccgacaagccctggcccgtggccctctacctgacccccgtgtccagcgccgggggcgtcgcgatcaaggccgggtccctgatcgccgtgctcatcctgcgccagacgaacaactacaacagcgacgacttccagttcgtgtggaacatctacgccaacaacgacgtcgtggtgccgaccggcggctgcgacgtctccgcccgggacgtgaccgtgaccctgcccgactaccccgggagcgtccccatcccgctcacggtgtactgcgcgaagtcccagaacctgggctactacctgagcgggaccaccgccgacgccggcaacagcatcttcaccaacacggcctccttcagccccgcccagggcgtcggggtgcagctcacccgccagggcaccatcatccccgcgaacaacaccgtgtccctgggggccgtcggcacgagcgccgtgtccctggggctcaccgccaactacgcccggaccggcggccaggtgaccgcggggaacgtccagagcatcatcggcgtgacgttcgtgtaccagcccggggacggcaacgccgacgtcaccatcaccgtgaacgggaaggtggtcgccaagtccggcggcgacatcatcaagctgctgaacgagcaggtcaacaaggagatgcagagctccaacctctacatgagcatgtccagctggtgctacacccactccctggacggggccggcctgttcctcttcgaccacgccgcggaggagtacgagcacgccaagaagctgatcatcttcctgaacgagaacaacgtgccggtgcagctcacgagcatctccgcccccgagcacaagttcgaggggctgacccagatcttccagaaggcctacgagcacgagcagcacatcagcgagtccatcaacaacatcgtggaccacgcgatcaagagcaaggaccacgccaccttcaacttcctgcagtggtacgtggccgagcagcacgaggaggaggtcctcttcaaggacatcctggacaagatcgagctgatcggcaacgagaaccacgggctctacctggccgaccagtacgtgaagggcatcgccaagtcccgcaagagctgatgatgaggactagtccctgttcccagagcccacttttttttctttttttgaaataaaatagcctgtctttcagatctaaaaaaaaaaaaaaaaaaaaaaaaaaaaaaaaaaaaaaaaaaaaaaaaaaaaaaaaaaaaaaaaaaaaaaaaaaaaaaaaaaaaaaaaaaaaaaaaaaaa

SEQ ID NO: 1168 - RNA, 1703 nt, synthetic construct
  misc_feature 1..1703: note Artificial____HsIgE(1-18)_Ec(J96)-FimH(22-300_N28S_N91S_N24 9Q_N256D)_Linker-PGDGN_Ec(J96)-FimG(24-37)_Linker-SGG_Ferri tin(5-167_N19Q) mRNA opt1
  source 1..1703: mol_type = other RNA
aggagagtcccgcagtcggcgtccagcggctctgcttgttcgtgtgtgtgtcgttgcaggccttattcaagcttaccatggactggacctggatcctgttcctcgtggccgccgcgacccgcgtccacagcttcgcctgcaagacggcctccggcaccgccatccccatcgggggcgggagcgccaacgtgtacgtgaacctggcgccggtcgtgaacgtgggccagaacctggtcgtggacctctccacccagatcttctgccacaacgactaccccgagaccatcacggactacgtgaccctgcagcgggggagcgcctacggcggcgtcctgtccagcttctccgggaccgtgaagtacagcggctccagctaccccttccccaccacgtccgagaccccgcgcgtggtctacaacagccggaccgacaagccctggcccgtggccctctacctgacccccgtgtccagcgccgggggcgtcgcgatcaaggccgggtccctgatcgccgtgctcatcctgcgccagacgaacaactacaacagcgacgacttccagttcgtgtggaacatctacgccaacaacgacgtcgtggtgccgaccggcggctgcgacgtctccgcccgggacgtgaccgtgaccctgcccgactaccccgggagcgtccccatcccgctcacggtgtactgcgcgaagtcccagaacctgggctactacctgagcgggaccaccgccgacgccggcaacagcatcttcaccaacacggcctccttcagccccgcccagggcgtcggggtgcagctcacccgccagggcaccatcatccccgcggacaacaccgtgtccctgggggccgtcggcacgagcgccgtgtccctggggctcaccgccaactacgcccggaccggcggccaggtgaccgcggggaacgtccagagcatcatcggcgtgacgttcgtgtaccagcccggggacggcaacgccgacgtcaccatcaccgtgaacgggaaggtggtcgccaagtccggcggcgacatcatcaagctgctgaacgagcaggtcaacaaggagatgcagagctccaacctctacatgagcatgtccagctggtgctacacccactccctggacggggccggcctgttcctcttcgaccacgccgcggaggagtacgagcacgccaagaagctgatcatcttcctgaacgagaacaacgtgccggtgcagctcacgagcatctccgcccccgagcacaagttcgaggggctgacccagatcttccagaaggcctacgagcacgagcagcacatcagcgagtccatcaacaacatcgtggaccacgcgatcaagagcaaggaccacgccaccttcaacttcctgcagtggtacgtggccgagcagcacgaggaggaggtcctcttcaaggacatcctggacaagatcgagctgatcggcaacgagaaccacgggctctacctggccgaccagtacgtgaagggcatcgccaagtcccgcaagagctgatgatgaggactagtccctgttcccagagcccacttttttttctttttttgaaataaaatagcctgtctttcagatctaaaaaaaaaaaaaaaaaaaaaaaaaaaaaaaaaaaaaaaaaaaaaaaaaaaaaaaaaaaaaaaaaaaaaaaaaaaaaaaaaaaaaaaaaaaaaaaaaaaa

SEQ ID NO: 1169 - RNA, 1703 nt, synthetic construct
  misc_feature 1..1703: note Artificial____HsIgE(1-18)_Ec(J96)-FimH(22-300_N28S_V48C_L55 C_N91S_N249Q)_Linker-PGDGN_Ec(J96)-FimG(24-37)_Linker-SGG_F erritin(5-167_N19Q) mRNA opt1
  source 1..1703: mol_type = other RNA
aggagagtcccgcagtcggcgtccagcggctctgcttgttcgtgtgtgtgtcgttgcaggccttattcaagcttaccatggactggacctggatcctgttcctcgtggccgccgcgacccgcgtccacagcttcgcctgcaagacggcctccggcaccgccatccccatcgggggcgggagcgccaacgtgtacgtgaacctggcgccgtgcgtcaacgtgggccagaactgcgtggtcgacctgtccacccagatcttctgccacaacgactaccccgagaccatcacggactacgtgaccctccagcgggggagcgcctacggcggcgtgctgtccagcttctccgggaccgtcaagtacagcggctccagctaccccttccccaccacgtccgagaccccgcgcgtggtgtacaacagccggaccgacaagccctggcccgtcgccctgtacctcacccccgtgtccagcgccgggggcgtggcgatcaaggccgggtccctgatcgccgtcctgatcctccgccagacgaacaactacaacagcgacgacttccagttcgtgtggaacatctacgccaacaacgacgtggtcgtgccgaccggcggctgcgacgtgtccgcccgggacgtcaccgtgaccctgcccgactaccccgggagcgtgcccatcccgctgacggtctactgcgcgaagtcccagaacctcggctactacctgagcgggaccaccgccgacgccggcaacagcatcttcaccaacacggcctccttcagccccgcccagggcgtgggggtccagctgacccgccagggcaccatcatccccgcgaacaacaccgtgtccctcggggccgtgggcacgagcgccgtctccctggggctgaccgccaactacgcccggaccggcggccaggtgaccgcggggaacgtgcagagcatcatcggcgtcacgttcgtgtaccagcccggggacggcaacgccgacgtgaccatcaccgtcaacgggaaggtggtggccaagtccggcggcgacatcatcaagctcctgaacgagcaggtcaacaaggagatgcagagctccaacctgtacatgagcatgtccagctggtgctacacccactccctcgacggggccggcctgttcctgttcgaccacgccgcggaggagtacgagcacgccaagaagctcatcatcttcctgaacgagaacaacgtgccggtgcagctgacgagcatctccgcccccgagcacaagttcgaggggctcacccagatcttccagaaggcctacgagcacgagcagcacatcagcgagtccatcaacaacatcgtcgaccacgcgatcaagagcaaggaccacgccaccttcaacttcctgcagtggtacgtggccgagcagcacgaggaggaggtgctgttcaaggacatcctcgacaagatcgagctgatcggcaacgagaaccacgggctgtacctcgccgaccagtacgtcaagggcatcgccaagtcccgcaagagctgatgatgaggactagtccctgttcccagagcccacttttttttctttttttgaaataaaatagcctgtctttcagatctaaaaaaaaaaaaaaaaaaaaaaaaaaaaaaaaaaaaaaaaaaaaaaaaaaaaaaaaaaaaaaaaaaaaaaaaaaaaaaaaaaaaaaaaaaaaaaaaaaaa

SEQ ID NO: 1170 - RNA, 1703 nt, synthetic construct
  misc_feature 1..1703: note Artificial____HsIgE(1-18)_Ec(J96)-FimH(22-300_F165V)_Linker -PGDGN_Ec(J96)-FimG(24-37)_Linker-SGG_Ferritin(5-167_N19Q) mRNA opt1
  source 1..1703: mol_type = other RNA
aggagagtcccgcagtcggcgtccagcggctctgcttgttcgtgtgtgtgtcgttgcaggccttattcaagcttaccatggactggacctggatcctgttcctcgtggccgccgcgacccgcgtgcacagcttcgcctgcaagacggccaacggcaccgccatccccatcgggggcgggtccgccaacgtgtacgtgaacctggcgccggtcgtgaacgtgggccagaacctggtcgtggacctcagcacccagatcttctgccacaacgactaccccgagaccatcacggactacgtgaccctgcagcgggggtccgcctacggcggcgtcctgagcaacttctccgggaccgtgaagtacagcggctccagctaccccttccccaccacgtccgagaccccgcgcgtggtctacaacagccggaccgacaagccctggcccgtggccctctacctgacccccgtgtccagcgccgggggcgtcgcgatcaaggccgggtccctgatcgccgtgctcatcctgcgccagacgaacaactacaacagcgacgacttccaggtggtctggaacatctacgccaacaacgacgtggtggtcccgaccggcggctgcgacgtgtccgcccgggacgtgaccgtcaccctgcccgactaccccgggagcgtgcccatcccgctcacggtctactgcgcgaagtcccagaacctgggctactacctgagcgggaccaccgccgacgccggcaactccatcttcaccaacacggccagcttcagccccgcccagggcgtgggggtgcagctcacccgcaacggcaccatcatccccgcgaacaacaccgtctccctgggggccgtgggcacgagcgccgtgtccctggggctcaccgccaactacgcccggaccggcggccaggtcaccgcggggaacgtgcagagcatcatcggcgtgacgttcgtctaccagcccggggacggcaacgccgacgtgaccatcaccgtgaacgggaaggtcgtggccaagtccggcggcgacatcatcaagctgctgaacgagcaggtcaacaaggagatgcagagctccaacctctacatgagcatgtccagctggtgctacacccactccctggacggggccggcctgttcctcttcgaccacgccgcggaggagtacgagcacgccaagaagctgatcatcttcctgaacgagaacaacgtgccggtgcagctcacgagcatctccgcccccgagcacaagttcgaggggctgacccagatcttccagaaggcctacgagcacgagcagcacatcagcgagtccatcaacaacatcgtggaccacgcgatcaagagcaaggaccacgccaccttcaacttcctgcagtggtacgtcgccgagcagcacgaggaggaggtcctcttcaaggacatcctggacaagatcgagctgatcggcaacgagaaccacgggctctacctggccgaccagtacgtgaagggcatcgccaagtcccgcaagagctgatgatgaggactagtccctgttcccagagcccacttttttttctttttttgaaataaaatagcctgtctttcagatctaaaaaaaaaaaaaaaaaaaaaaaaaaaaaaaaaaaaaaaaaaaaaaaaaaaaaaaaaaaaaaaaaaaaaaaaaaaaaaaaaaaaaaaaaaaaaaaaaaaa

SEQ ID NO: 1171 - RNA, 980 nt, synthetic construct
  misc_feature 1..980: note Artificial____Ec(J96)-FimC(1-36)_Ec(J96)-FimC(37-241) mRNA opt3
  source 1..980: mol_type = other RNA
aggagagtcccgcagtcggcgtccagcggctctgcttgttcgtgtgtgtgtcgttgcaggccttattcaagcttaccatgagcaacaagaatgtgaacgtcagaaaatcccaggagatcaccttctgcctgctcgccggcattcttatgtttatggctatgatggttgcagggagggccgaagcgggagtggctctgggtgccacacgggtaatataccccgcaggccaaaaacaggtgcagttggccgtcactaataacgacgaaaattctacgtatttaatccagtcatgggtggagaacgctgatggggttaaggacggacgcttcattgtgacccctccactgtttgcaatgaagggcaaaaaggagaatacactacgaatcctcgatgccactaacaatcaactgccgcaggaccgtgaaagtcttttctggatgaacgtcaaggctattcccagcatggataaatccaagctgaccgagaatacattgcagctcgccatcatatctagaatcaaactgtactataggcctgcgaagctggcactcccacccgaccaggccgctgagaaattacggtttcgcagatcggccaactcactgacccttattaatcctactccatactatttgacagtgaccgaactgaacgcaggtacgagggtactagagaatgctctcgttccccctatgggggaaagcactgtgaagctgccaagtgatgccggatccaacatcacctaccggacaattaacgactatggcgcgcttactccgaagatgaccggcgtcatggagtgatgatgaggactagtccctgttcccagagcccacttttttttctttttttgaaataaaatagcctgtctttcagatctaaaaaaaaaaaaaaaaaaaaaaaaaaaaaaaaaaaaaaaaaaaaaaaaaaaaaaaaaaaaaaaaaaaaaaaaaaaaaaaaaaaaaaaaaaaaaaaaaaaa

SEQ ID NO: 1172 - RNA, 926 nt, synthetic construct
  misc_feature 1..926: note = Artificial____HsIgE(1-18)_Ec(J96)-FimC(37-241) mRNA opt3
  source 1..926: mol_type = other RNA
aggagagtcccgcagtcggcgtccagcggctctgcttgttcgtgtgtgtgtcgttgcaggccttattcaagcttaccatggactggacctggatcctgttcctcgtggccgctgcaacaagagtccacagcggcgttgcccttggggcgactagggtgatttaccccgctggacagaagcaagtacagctggccgtgacgaacaatgatgagaactccacctatttgatacagtcttgggtcgaaaatgcagacggtgtgaaagatggccggtttatcgttacacctccattattcgccatgaaggggaaaaaggagaacactctgcgcattctagacgctaccaataaccagctcccgcaagatcgagaatcactgttttggatgaatgtgaaagcaatccccagtatggacaagagcaaacttacagagaacaccctgcagttggccattatctcccgtataaagctctactatagacctgctaagctggccctgccacccgatcaggcggcagaaaaactcaggttccggcgctctgccaattcgttaactctgatcaaccctacaccatactatcttaccgtcacggagttgaatgctggaactagagtgctggagaacgccctagtaccccctatgggcgaatcaaccgttaagctcccaagcgacgcaggtagtaatattacatacaggactatcaacgattatggggctctgaccccgaaaatgacaggagtgatggagtgatgatgaggactagtccctgttcccagagcccacttttttttctttttttgaaataaaatagcctgtctttcagatctaaaaaaaaaaaaaaaaaaaaaaaaaaaaaaaaaaaaaaaaaaaaaaaaaaaaaaaaaaaaaaaaaaaaaaaaaaaaaaaaaaaaaaaaaaaaaaaaaaaa

SEQ ID NO: 1173 - RNA, 1157 nt, synthetic construct
  misc_feature 1..1157: note Artificial____Ec(J96)-FimH(1-21)_Ec(J96)-FimH(22-300) mRNA opt3
  source 1..1157: mol_type = other RNA
aggagagtcccgcagtcggcgtccagcggctctgcttgttcgtgtgtgtgtcgttgcaggccttattcaagcttaccatgaagagagtgatcaccctgttcgccgtcctccttatgggctggagcgttaacgcttggtcctttgcatgcaaaacagccaatgggactgcgattcccataggaggtggctctgctaacgtgtacgtaaatctggcccctgtggtcaacgtggggcagaatttggttgtggacttatcaacgcaaatcttctgtcacaacgattatccagagaccattacagactacgtcactctgcagaggggaagtgcatatggcggtgtgctaagcaatttttccgggaccgtaaagtactctggatcgtcatatccgttccccacaaccagcgaaactcctcgggttgtgtacaacagtcgcacagataaaccatggcccgtcgccctctatctgacccctgtgtcctctgctggcggcgtggcaatcaaggccgggagccttattgctgtcctgatcttgcgacagacgaataactacaattccgacgattttcagttcgtttggaacatatacgccaataacgacgtggtagtgccaactggaggttgcgatgtctcagcgcgtgacgtgaccgttacactccccgattatcctggcagtgtgccaatcccgctgactgtctactgtgcaaaaagccaaaatctggggtattacctctctggaaccacagccgacgctggcaactccatttttaccaacacggcctcattcagccccgcacagggtgtgggggtacagttaactagaaatggaacaatcattcctgctaacaataccgttagtctgggcgccgtgggcacttctgcggtctcccttgggttgacagccaactatgcaaggaccggaggtcaggtgacggctggcaatgtccaaagcatcataggggtgacctttgtttaccagtgatgatgaggactagtccctgttcccagagcccacttttttttctttttttgaaataaaatagcctgtctttcagatctaaaaaaaaaaaaaaaaaaaaaaaaaaaaaaaaaaaaaaaaaaaaaaaaaaaaaaaaaaaaaaaaaaaaaaaaaaaaaaaaaaaaaaaaaaaaaaaaaaaa

SEQ ID NO: 1174 - RNA, 1148 nt, synthetic construct
  misc_feature 1..1148: note = Artificial____HsIgE(1-18)_Ec(J96)-FimH(22-300) mRNA opt3
  source 1..1148: mol_type = other RNA
aggagagtcccgcagtcggcgtccagcggctctgcttgttcgtgtgtgtgtcgttgcaggccttattcaagcttaccatggactggacctggatcctgttcctcgtggccgctgcaacaagagtccacagctttgcctgcaagactgcgaacggcacggctattcccatagggggaggttccgccaatgtttacgtgaaccttgcacctgtagtgaatgtcggccagaacctggtggttgatttgtctacccaaatcttctgtcataatgactatccagagacaattactgattacgtgaccttacagagggggtcagcctatggaggcgtcctgagtaactttagcggtacagtgaaatactccgggtcttcgtatccgttccccaccacttcagaaacacctcgggtagtttacaatagccgcaccgacaagccatggcccgtggctctatatctcacgcctgtcagttccgcaggaggcgtggccatcaaagctggctctctgattgccgtgcttatcctgcgacagactaacaattacaacagcgatgactttcagttcgtctggaatatatacgcgaacaatgatgttgtggtaccaaccgggggatgcgacgtgtccgcacgtgatgtcacagtgactttgcccgactatcctggttcagttccaatcccgctcaccgtgtactgtgccaagagtcaaaacctgggctattacctgagcgggacaaccgctgatgccggaaattctatttttacgaacactgcatccttctcacccgctcagggcgtcggtgtgcagctcacaagaaacgggaccatcattcctgccaataacactgttagcttaggagcggtaggcacaagtgccgtgtctctgggccttaccgcaaattatgctaggaccgggggacaggtcacggccggtaacgtgcaatccatcataggcgtcacatttgtgtaccagtgatgatgaggactagtccctgttcccagagcccacttttttttctttttttgaaataaaatagcctgtctttcagatctaaaaaaaaaaaaaaaaaaaaaaaaaaaaaaaaaaaaaaaaaaaaaaaaaaaaaaaaaaaaaaaaaaaaaaaaaaaaaaaaaaaaaaaaaaaaaaaaaaaa

SEQ ID NO: 1175 - RNA, 1154 nt, synthetic construct
  misc_feature 1..1154: note = Artificial____MmIgK(1-20)_Ec(J96)-FimH(22-300) mRNA opt3
  source 1..1154: mol_type = other RNA
aggagagtcccgcagtcggcgtccagcggctctgcttgttcgtgtgtgtgtcgttgcaggccttattcaagcttaccatggagaccgacacactgctcctttgggtgctgttgttatgggtccccggcagcactgggttcgcctgcaagacggctaacggaaccgcaatccctattggtggcgggtccgccaatgtttacgtgaacctggcgccagtagtgaatgtcggacagaacctagtggttgatctctctacacaaatattttgtcacaatgactatccggaaactatcaccgattacgtgacactgcagagaggctcagcttatggtggggtccttagtaacttcagcggaaccgtgaaatactccggctcatcgtatccctttcctactacatcagagaccccaagggtagtttacaatagccggacggacaagccctggcctgtggccctgtatttgactccagtcagttccgcaggcggggtggccattaaagctggatctctcatcgcagtgctgattctgcgccagaccaacaattacaacagcgatgacttccagtttgtctggaatatctacgccaacaatgatgttgtggtacccacaggtggctgcgacgtgtccgctcgagatgtcactgtgaccctccctgactatccagggtcagttccgatacccttaacagtgtactgtgccaagagtcaaaacctgggatattaccttagcggcaccacggcggatgcaggtaattctatcttcactaacacagcctccttttctcctgctcagggggtcggagtgcagttgacccgtaacggcactattatcccagccaataacacagtaagcctgggcgcagttgggaccagtgctgtgtctctaggactcacggccaattatgcgagaaccggtggccaggtcacagccgggaacgtgcaatccattatcggagtcactttcgtgtaccagtgatgatgaggactagtccctgttcccagagcccacttttttttctttttttgaaataaaatagcctgtctttcagatctaaaaaaaaaaaaaaaaaaaaaaaaaaaaaaaaaaaaaaaaaaaaaaaaaaaaaaaaaaaaaaaaaaaaaaaaaaaaaaaaaaaaaaaaaaaaaaaaaaaa

SEQ ID NO: 1176 - RNA, 1214 nt, synthetic construct
  misc_feature 1..1214: note Artificial____Ec(J96)-FimH(1-21)_Ec(J96)-FimH(22-300)_Linke r-PGDGN_Ec(J96)-FimG(24-37) mRNA opt3
  source 1..1214: mol_type = other RNA
aggagagtcccgcagtcggcgtccagcggctctgcttgttcgtgtgtgtgtcgttgcaggccttattcaagcttaccatgaagagagtgatcaccctgttcgccgtcctccttatgggctggagcgttaacgcttggtcctttgcatgcaaaacagccaatgggactgcgattcccataggaggtggctctgctaacgtgtacgtaaatctggcccctgtggtcaacgtggggcagaatttggttgtggacttatcaacgcaaatcttctgtcacaacgattatccagagaccattacagactacgtcactctgcagaggggaagtgcatatggcggtgtgctaagcaatttttccgggaccgtaaagtactctggatcgtcatatccgttccccacaaccagcgaaactcctcgggttgtgtacaacagtcgcacagataaaccatggcccgtcgccctctatctgacccctgtgtcctctgctggcggcgtggcaatcaaggccgggagccttattgctgtcctgatcttgcgacagacgaataactacaattccgacgattttcagttcgtttggaacatatacgccaataacgacgtggtagtgccaactggaggttgcgatgtctcagcgcgtgacgtgaccgttacactccccgattatcctggcagtgtgccaatcccgctgactgtctactgtgcaaaaagccaaaatctggggtattacctctctggaaccacagccgacgctggcaactccatttttaccaacacggcctcattcagccccgcacagggtgtgggggtacagttaactagaaatggaacaatcattcctgctaacaataccgttagtctgggcgccgtgggcacttctgcggtctcccttgggttgacagccaactatgcaaggaccggaggtcaggtgacggctggcaatgtccaaagcatcataggggtgacctttgtttaccagccaggagatggcaacgccgacgtgacaattactgtaaatggtaaggtcgtggctaagtgatgatgaggactagtccctgttcccagagcccacttttttttctttttttgaaataaaatagcctgtctttcagatctaaaaaaaaaaaaaaaaaaaaaaaaaaaaaaaaaaaaaaaaaaaaaaaaaaaaaaaaaaaaaaaaaaaaaaaaaaaaaaaaaaaaaaaaaaaaaaaaaaaa

SEQ ID NO: 1177 - RNA, 1205 nt, synthetic construct
  misc_feature 1..1205: note Artificial____HsIgE(1-18)_Ec(J96)-FimH(22-300)_Linker-PGDGN _Ec(J96)-FimG(24-37) mRNA opt3
  source 1..1205: mol_type = other RNA
aggagagtcccgcagtcggcgtccagcggctctgcttgttcgtgtgtgtgtcgttgcaggccttattcaagcttaccatggactggacctggatcctgttcctcgtggccgctgcaacaagagtccacagctttgcctgcaagactgcgaacggcacggctattcccatagggggaggttccgccaatgtttacgtgaaccttgcacctgtagtgaatgtcggccagaacctggtggttgatttgtctacccaaatcttctgtcataatgactatccagagacaattactgattacgtgaccttacagagggggtcagcctatggaggcgtcctgagtaactttagcggtacagtgaaatactccgggtcttcgtatccgttccccaccacttcagaaacacctcgggtagtttacaatagccgcaccgacaagccatggcccgtggctctatatctcacgcctgtcagttccgcaggaggcgtggccatcaaagctggctctctgattgccgtgcttatcctgcgacagactaacaattacaacagcgatgactttcagttcgtctggaatatatacgcgaacaatgatgttgtggtaccaaccgggggatgcgacgtgtccgcacgtgatgtcacagtgactttgcccgactatcctggttcagttccaatcccgctcaccgtgtactgtgccaagagtcaaaacctgggctattacctgagcgggacaaccgctgatgccggaaattctatttttacgaacactgcatccttctcacccgctcagggcgtcggtgtgcagctcacaagaaacgggaccatcattcctgccaataacactgttagcttaggagcggtaggcacaagtgccgtgtctctgggccttaccgcaaattatgctaggaccgggggacaggtcacggccggtaacgtgcaatccatcataggcgtcacatttgtgtaccagccaggggacggaaatgctgatgttactattaccgtgaacggcaaagtagtcgccaagtgatgatgaggactagtccctgttcccagagcccacttttttttctttttttgaaataaaatagcctgtctttcagatctaaaaaaaaaaaaaaaaaaaaaaaaaaaaaaaaaaaaaaaaaaaaaaaaaaaaaaaaaaaaaaaaaaaaaaaaaaaaaaaaaaaaaaaaaaaaaaaaaaaa

SEQ ID NO: 1178 - RNA, 1211 nt, synthetic construct
  misc_feature 1..1211: note Artificial____HsIgE(1-18)_Ec(J96)-FimH(22-300)_Linker-G4SGG _Ec(J96)-FimG(24-37) mRNA opt3
  source 1..1211: mol_type = other RNA
aggagagtcccgcagtcggcgtccagcggctctgcttgttcgtgtgtgtgtcgttgcaggccttattcaagcttaccatggactggacctggatcctgttcctcgtggccgctgcaacaagagtccacagctttgcctgcaagactgcgaacggcacggctattcccatagggggaggttccgccaatgtttacgtgaaccttgcacctgtagtgaatgtcggccagaacctggtggttgatttgtctacccagatcttctgtcataatgactatccagagacaattactgattacgtgaccttacagagggggtcagcctatggaggcgtcctgagtaactttagcggtacagtgaaatactccgggtcttcgtatccgttccccaccacttcagaaacacctcgggtagtttacaatagccgcaccgacaagccatggcccgtggctctatatctcacgcctgtcagttccgcaggaggcgtggccatcaaagctggctctctgattgccgtgcttatcctgcgacagactaacaattacaacagcgatgactttcagttcgtctggaatatatacgcgaacaatgatgttgtggtaccaaccgggggatgcgacgtgtccgcacgtgatgtcacagtgactttgcccgactatcctggttcagttccaatcccgctcaccgtgtactgtgccaagagtcaaaacctgggctattacctgagcgggacaaccgctgatgccggaaattctatttttacgaacactgcatccttctcacccgctcagggcgtcggtgtgcagctcacaagaaacgggaccatcattcctgccaataacactgttagcttaggagcggtaggcacaagtgccgtgtctctgggccttaccgcaaattatgctaggaccgggggacaggtcacggccggtaacgtgcaatccatcataggcgtcacatttgtgtaccaagggggaggcggtagcgggggcgctgacgttactattaccgtgaatggaaaagtagtcgccaagtgatgatgaggactagtccctgttcccagagcccacttttttttctttttttgaaataaaatagcctgtctttcagatctaaaaaaaaaaaaaaaaaaaaaaaaaaaaaaaaaaaaaaaaaaaaaaaaaaaaaaaaaaaaaaaaaaaaaaaaaaaaaaaaaaaaaaaaaaaaaaaaaaaa

SEQ ID NO: 1179 - RNA, 1211 nt, synthetic construct
  misc_feature 1..1211: note Artificial____MmIgK(1-20)_Ec(J96)-FimH(22-300)_Linker-PGDGN _Ec(J96)-FimG(24-37) mRNA opt3
  source 1..1211: mol_type = other RNA
aggagagtcccgcagtcggcgtccagcggctctgcttgttcgtgtgtgtgtcgttgcaggccttattcaagcttaccatggagaccgacacactgctcctttgggtgctgttgttatgggtccccggcagcactgggttcgcctgcaagacggctaacggaaccgcaatccctattggtggcgggtccgccaatgtttacgtgaacctggcgccagtagtgaatgtcggacagaacctagtggttgatctctctacacaaatattttgtcacaatgactatccggaaactatcaccgattacgtgacactgcagagaggctcagcttatggtggggtccttagtaacttcagcggaaccgtgaaatactccggctcatcgtatccctttcctactacatcagagaccccaagggtagtttacaatagccggacggacaagccctggcctgtggccctgtatttgactccagtcagttccgcaggcggggtggccattaaagctggatctctcatcgcagtgctgattctgcgccagaccaacaattacaacagcgatgacttccagtttgtctggaatatctacgccaacaatgatgttgtggtacccacaggtggctgcgacgtgtccgctcgagatgtcactgtgaccctccctgactatccagggtcagttccgatacccttaacagtgtactgtgccaagagtcaaaacctgggatattaccttagcggcaccacggcggatgcaggtaattctatcttcactaacacagcctccttttctcctgctcagggggtcggagtgcagttgacccgtaacggcactattatcccagccaataacacagtaagcctgggcgcagttgggaccagtgctgtgtctctaggactcacggccaattatgcgagaaccggtggccaggtcacagccgggaacgtgcaatccattatcggagtcactttcgtgtaccagcccggcgacggtaatgcagatgttaccataacagtgaacgggaaagtagtcgctaagtgatgatgaggactagtccctgttcccagagcccacttttttttctttttttgaaataaaatagcctgtctttcagatctaaaaaaaaaaaaaaaaaaaaaaaaaaaaaaaaaaaaaaaaaaaaaaaaaaaaaaaaaaaaaaaaaaaaaaaaaaaaaaaaaaaaaaaaaaaaaaaaaaaa

SEQ ID NO: 1180 - RNA, 1211 nt, synthetic construct
  misc_feature 1..1211: note Artificial____MmIgK(1-20)_Ec(536)-FimH(22-300)_Linker-PGDGN _Ec(J96)-FimG(24-37) mRNA opt3
  source 1..1211: mol_type = other RNA
aggagagtcccgcagtcggcgtccagcggctctgcttgttcgtgtgtgtgtcgttgcaggccttattcaagcttaccatggagaccgacacactgctcctttgggtgctgttgttatgggtccccggcagcactgggttcgcctgcaagacggctaacggaaccgcaatccctattggtggcgggtccgccaatgtttacgtgaacctggcgccagctgtaaatgtgggacagaacctagtcgtggatctctctacacaaatattttgtcacaatgactatccggaaactatcaccgattacgttacactgcagagaggctcagcctatggtggggtgcttagtagcttctccggaaccgtcaaatacaacggctcatcgtatccctttcctactacatcagagaccccaagggtggtatacaatagccggacggacaagccctggcctgttgcactgtatttgactccagtgagttccgccggcggggtcgctattaaagcaggatctctcatcgccgtgctgattctgcgccagaccaacaattacaacagcgatgacttccagtttgtgtggaatatctacgctaacaatgatgtcgttgtgcccacaggtggctgcgacgtatccgcccgagatgtgactgtcaccctccctgactatccagggtcagtgccgatacccttaacagtttactgtgcgaagagtcaaaacctgggatattaccttagcggcaccacggcagatgccggtaattctatcttcactaacacagcttccttttctcctgcccagggggtgggagtccagttgacccgtaacggcactattatcccagcaaataacacagtgagcctgggcgctgtagggaccagtgccgtttctctaggactcacggcgaattatgccagaaccggtggccaggtgacagcagggaacgtccaatccattatcggagtgactttcgtctaccagcccggcgacggtaatgctgatgtgaccataacagttaacgggaaagtggtagccaagtgatgatgaggactagtccctgttcccagagcccacttttttttctttttttgaaataaaatagcctgtctttcagatctaaaaaaaaaaaaaaaaaaaaaaaaaaaaaaaaaaaaaaaaaaaaaaaaaaaaaaaaaaaaaaaaaaaaaaaaaaaaaaaaaaaaaaaaaaaaaaaaaaaa

SEQ ID NO: 1181 - RNA, 1235 nt, synthetic construct
  misc_feature 1..1235: note Artificial____HsIgE(1-18)_Ec(J96)-FimH(22-300)_Linker-(G4S) 3_Ec(J96)-FimC(135-148) mRNA opt3
  source 1..1235: mol_type = other RNA
aggagagtcccgcagtcggcgtccagcggctctgcttgttcgtgtgtgtgtcgttgcaggccttattcaagcttaccatggactggacctggatcctgttcctcgtggccgctgcaacaagagtccacagctttgcctgcaagactgcgaacggcacggctattcccatagggggaggttccgccaatgtttacgtgaaccttgcacctgtagtgaatgtcggccagaacctggtggttgatttgtctacccagatcttctgtcataatgactatccagagacaattactgattacgtgaccttacagagggggtcagcctatggaggcgtcctgagtaactttagcggtacagtgaaatactccgggtcttcgtatccgttccccaccacttcagaaacacctcgggtagtttacaatagccgcaccgacaagccatggcccgtggctctatatctcacgcctgtcagttccgcaggaggcgtggccatcaaagctggctctctgattgccgtgcttatcctgcgacagactaacaattacaacagcgatgactttcagttcgtctggaatatatacgcgaacaatgatgttgtggtaccaaccgggggatgcgacgtgtccgcacgtgatgtcacagtgactttgcccgactatcctggttcagttccaatcccgctcaccgtgtactgtgccaagagtcaaaacctgggctattacctgagcgggacaaccgctgatgccggaaattctatttttacgaacactgcatccttctcacccgctcagggcgtcggtgtgcagctcacaagaaacgggaccatcattcctgccaataacactgtatcgttaggagcggttggcacaagtgccgtgtctctgggccttaccgcaaattatgctaggaccgggggacaggtcacggccggtaacgtgcaatccatcataggcgtcacatttgtgtaccaagggggaggcggtagcgggggcggaggcagcgggggaggtggctctactgagaataccttgcagctggctattatctcccggattaaatgatgatgaggactagtccctgttcccagagcccacttttttttctttttttgaaataaaatagcctgtctttcagatctaaaaaaaaaaaaaaaaaaaaaaaaaaaaaaaaaaaaaaaaaaaaaaaaaaaaaaaaaaaaaaaaaaaaaaaaaaaaaaaaaaaaaaaaaaaaaaaaaaaa

SEQ ID NO: 1182 - RNA, 1658 nt, synthetic construct
  misc_feature 1..1658: note Artificial____LumSynth(1-154_C37A_N102D)_Linker(GGS)4-GGG_E c(J96)-FimH(22-300)_Linker-PGDGN_Ec(J96)-FimG(24-37) mRNA opt3
  source 1..1658: mol_type = other RNA
aggagagtcccgcagtcggcgtccagcggctctgcttgttcgtgtgtgtgtcgttgcaggccttattcaagcttaccatgcagatctacgagggcaagctgaccgccgaagggctcagattcggaattgtggctagcaggtttaaccacgcacttgtcgaccggctggttgagggtgccatagatgcgatcgtgcgccatggcgggcgagaagaggacattacattggtacgtgtgcccggatcctgggaaatccctgtcgctgccggcgagttagcaagaaaagaggatattgacgccgtgatcgctataggtgttctgatcaggggagcaactccacacttcgattatattgcctctgaagtgtcaaaggggctagctgacctcagtctggagcttcggaaaccgatcacgtttggcgtcattaccgccgatacactggaacaagcgatcgagcgcgcaggcactaagcatgggaataaaggatgggaggccgctttgagcgccatagaaatggcaaacctcttcaagtccctgagaggtggctctgggggatcgggcggttcagggggaagcggcggcgggtttgcttgcaagaccgccaatggaacagcgattcccatcggtggcgggagtgccaacgtgtacgtaaatctggcacctgttgtgaacgtcggacagaatctcgtggtggacttatccacccagattttctgtcacaacgattatccagagactatcacagactacgtcaccctgcagaggggctctgcttatggtggggttcttagcaatttttccggcacggtgaaatactcaggaagtagctatcccttccctactacctctgaaacaccacgggtagtgtacaactcccgcactgataagccctggcctgtcgccttgtacctgaccccagtgtcaagcgctggcggggttgccatcaaagcaggaagtctaattgccgtgctcatactgcgacaaacaaataactataattctgacgattttcagttcgtctggaacatctacgctaataacgacgtggtagttccgaccggtggctgcgacgtgtccgcgagagatgtcacggtgactcttcccgactatcctgggagcgtcccaattcccctgacagtgtactgtgcaaagtcgcagaacttgggatattacctctctggcaccactgccgatgctggtaattccatctttacaaacaccgcctcattcagtcctgcacagggggttggcgtgcaactgacgaggaatggaaccataattccagccaacaatacagtcagcttaggcgctgtagggacttccgccgtgtctctgggactcaccgcaaactatgcgcggacaggtggccaggttactgctgggaatgtgcagagcatcatcggagtcacctttgtgtaccagcccggcgacggtaacgccgatgtaacaattaccgtgaatgggaaagttgtcgcaaagtgatgatgaggactagtccctgttcccagagcccacttttttttctttttttgaaataaaatagcctgtctttcagatctaaaaaaaaaaaaaaaaaaaaaaaaaaaaaaaaaaaaaaaaaaaaaaaaaaaaaaaaaaaaaaaaaaaaaaaaaaaaaaaaaaaaaaaaaaaaaaaaaaaa

SEQ ID NO: 1183 - RNA, 1676 nt, synthetic construct
  misc_feature 1..1676: note Artificial____HsIgE(1-18)_Ec(J96)-FimH(22-300)_Linker-PGDGN _Ec(J96)-FimG(24-37)_Linker-SGG_LumSynth(1-154_C37A_N102D) mRNA opt3
  source 1..1676: mol_type = other RNA
aggagagtcccgcagtcggcgtccagcggctctgcttgttcgtgtgtgtgtcgttgcaggccttattcaagcttaccatggactggacctggatcctgttcctcgtggccgctgcaacaagagtccacagctttgcctgcaagactgcgaacggcacggctattcccatagggggaggttccgccaatgtttacgtgaaccttgcacctgtagtgaatgtcggccagaacctggtggttgatttgtctacccaaatcttctgtcataatgactatccagagacaattactgattacgtgaccttacagagggggtcagcctatggaggcgtcctgagtaactttagcggtacagtgaaatactccgggtcttcgtatccgttccccaccacttcagaaacacctcgggtagtttacaatagccgcaccgacaagccatggcccgtggctctatatctcacgcctgtcagttccgcaggaggcgtggccatcaaagctggctctctgattgccgtgcttatcctgcgacagactaacaattacaacagcgatgactttcagttcgtctggaatatatacgcgaacaatgatgttgtggtaccaaccgggggatgcgacgtgtccgcacgtgatgtcacagtgactttgcccgactatcctggttcagttccaatcccgctcaccgtgtactgtgccaagagtcaaaacctgggctattacctgagcgggacaaccgctgatgccggaaattctatttttacgaacactgcatccttctcacccgctcagggcgtcggtgtgcagctcacaagaaacgggaccatcattcctgccaataacactgttagcttaggagcggtaggcacaagtgccgtgtctctgggccttaccgcaaattatgctaggaccgggggacaggtcacggccggtaacgtgcaatccatcataggcgtcacatttgtgtaccagccaggggacggaaatgctgatgttactattaccgtgaacggcaaagtagtcgccaagagcggtgggatgcagatctatgagggcaagttgacagcagaaggactgcggttcggcattgtggcctcgcgctttaatcacgctctagttgacagactcgtggagggggcgatcgacgcaatcgtcaggcatggaggtcgggaagaggatattactctggtgcgcgtacccggctcttgggagatacctgtggccgctggggaacttgcccgaaaagaggacatcgatgcagttattgccatcggagtcctgataagaggcgctaccccacacttcgactacattgcctccgaagtgtcaaagggtttggcagatctcagtctggagttaaggaaacccatcacatttggggtgatcaccgcggacactctggagcaggctattgaacgggccggcacgaagcatggaaacaaaggctgggaggcagccctcagcgctatcgaaatggccaatcttttcaagtccctgcgttgatgatgaggactagtccctgttcccagagcccacttttttttctttttttgaaataaaatagcctgtctttcagatctaaaaaaaaaaaaaaaaaaaaaaaaaaaaaaaaaaaaaaaaaaaaaaaaaaaaaaaaaaaaaaaaaaaaaaaaaaaaaaaaaaaaaaaaaaaaaaaaaaaa

SEQ ID NO: 1184 - RNA, 1703 nt, synthetic construct
  misc_feature 1..1703: note Artificial____HsIgE(1-18)_Ec(J96)-FimH(22-300)_Linker-PGDGN _Ec(J96)-FimG(24-37)_Linker-SGG_Ferritin(5-167_N19Q) mRNA opt3
  source 1..1703: mol_type = other RNA
aggagagtcccgcagtcggcgtccagcggctctgcttgttcgtgtgtgtgtcgttgcaggccttattcaagcttaccatggactggacctggatcctgttcctcgtggccgctgcaacaagagtccacagctttgcctgcaagactgcgaacggcacggctattcccatagggggaggttccgccaatgtttacgtgaaccttgcacctgtagtgaatgtcggccagaacctggtggttgatttgtctacccaaatcttctgtcataatgactatccagagacaattactgattacgtgaccttacagagggggtcagcctatggaggcgtcctgagtaactttagcggtacagtgaaatactccgggtcttcgtatccgttccccaccacttcagaaacacctcgggtagtttacaatagccgcaccgacaagccatggcccgtggctctatatctcacgcctgtcagttccgcaggaggcgtggccatcaaagctggctctctgattgccgtgcttatcctgcgacagactaacaattacaacagcgatgactttcagttcgtctggaatatatacgcgaacaatgatgttgtggtaccaaccgggggatgcgacgtgtccgcacgtgatgtcacagtgactttgcccgactatcctggttcagttccaatcccgctcaccgtgtactgtgccaagagtcaaaacctgggctattacctgagcgggacaaccgctgatgccggaaattctatttttacgaacactgcatccttctcacccgctcagggcgtcggtgtgcagctcacaagaaacgggaccatcattcctgccaataacactgtgagcttaggagcggttggcacaagtgccgtgtctctgggccttaccgcaaattatgctaggaccgggggacaggtcacggccggtaacgtgcaatccatcataggcgtcacatttgtgtaccagccaggggacggaaatgctgatgttactattaccgtgaacggcaaagtagtcgccaagagcggtggggacatcattaagttgctgaatgagcaggtaaacaaagaaatgcagtcgtctaatctatatatgtccatgtcaagttggtgctacacacacagcctcgacggcgcaggactgttcctttttgatcatgccgctgaggaatacgagcacgcgaagaaactgatcatcttcttgaacgagaataacgttcccgtgcaactcacttccatttctgcacctgaacataagtttgagggcctgacccagatattccagaaagcctatgaacacgagcaacacatcagcgagtcaattaataacatcgtcgaccatgctataaagagtaaggatcacgccacattcaactttttacagtggtacgtggcagaacagcatgaggaagaggtactgttcaaagacattctcgataagatcgaacttatcgggaatgagaaccacggactgtatttggccgaccagtacgtgaaaggtattgctaagtcccggaaaagctgatgatgaggactagtccctgttcccagagcccacttttttttctttttttgaaataaaatagcctgtctttcagatctaaaaaaaaaaaaaaaaaaaaaaaaaaaaaaaaaaaaaaaaaaaaaaaaaaaaaaaaaaaaaaaaaaaaaaaaaaaaaaaaaaaaaaaaaaaaaaaaaaaa

SEQ ID NO: 1185 - RNA, 1733 nt, synthetic construct
  misc_feature 1..1733: note Artificial____MmIgK(1-20)_Ec(J96)-FimH(22-300)_Linker-PGDGN _Ec(J96)-FimG(24-37)_Linker-(GGS)4_Ferritin(5-166) mRNA opt3
  source 1..1733: mol_type = other RNA
aggagagtcccgcagtcggcgtccagcggctctgcttgttcgtgtgtgtgtcgttgcaggccttattcaagcttaccatggagaccgacacactgctcctttgggtgctgttgttatgggtccccggcagcactgggttcgcctgcaagacggctaacggaaccgcaatccctattggtggcgggtccgccaatgtttacgtgaacctggcgccagtagtgaatgtcggacagaacctagtggttgatctctctacacaaatattttgtcacaatgactatccggaaactatcaccgattacgtgacactgcagagaggctcagcttatggtggggtccttagtaacttcagcggaaccgtgaaatactccggctcatcgtatccctttcctactacatcagagaccccaagggtagtttacaatagccggacggacaagccctggcctgtggccctgtatttgactccagtcagttccgcaggcggggtggccattaaagctggatctctcatcgcagtgctgattctgcgccagaccaacaattacaacagcgatgacttccagtttgtctggaatatctacgccaacaatgatgttgtggtacccacaggtggctgcgacgtgtccgctcgagatgtcactgtgaccctccctgactatccagggtcagttccgatacccttaacagtgtactgtgccaagagtcaaaacctgggatattaccttagcggcaccacggcggatgcaggtaattctatcttcactaacacagcctccttttctcctgctcagggggtcggagtgcagttgacccgtaacggcactattatcccagccaataacacagtaagcctgggcgcagttgggaccagtgctgtgtctctaggactcacggccaattatgcgagaaccggtggccaggtcacagccgggaacgtgcaatccattatcggagtcactttcgtgtaccagcccggcgacggtaatgcagatgttaccataacagtgaacgggaaagtagtcgctaagggcggaagcggcgggtcgggaggttctggcgggtccgacattatcaagctgcttaatgaacaggtgaacaaagagatgaactcaagtaatctgtatatgagcatgtcctcttggtgctacactcatagcttggacggagccggcctctttctgttcgatcacgctgccgaagagtacgagcatgcaaagaaattaattatctttctgaatgaaaacaatgttcctgtgcagctcacctcaatcagtgccccagagcacaagttcgaaggtcttacacaaatttttcagaaggcttatgagcatgagcagcacatatccgaaagcatcaacaatattgtcgaccacgcgatcaaatctaaggatcatgcaaccttcaacttcctgcaatggtacgtggccgagcagcacgaagaggaagtattgtttaaagacatactagataagattgagctgatcgggaacgagaatcatggcctctatctggctgaccagtacgtgaaaggaatcgccaagtcaaggaaatgatgatgaggactagtccctgttcccagagcccacttttttttctttttttgaaataaaatagcctgtctttcagatctaaaaaaaaaaaaaaaaaaaaaaaaaaaaaaaaaaaaaaaaaaaaaaaaaaaaaaaaaaaaaaaaaaaaaaaaaaaaaaaaaaaaaaaaaaaaaaaaaaaa

SEQ ID NO: 1186 - RNA, 1376 nt, synthetic construct
  misc_feature 1..1376: note Artificial____HsIgE(1-18)_Ec(J96)-FimH(22-300)_Linker-PGDGN _Ec(J96)-FimG(24-37)_TMdomain-HA(510-566) mRNA opt3
  source 1..1376: mol_type = other RNA
aggagagtcccgcagtcggcgtccagcggctctgcttgttcgtgtgtgtgtcgttgcaggccttattcaagcttaccatggactggacctggatcctgttcctcgtggccgctgcaacaagagtccacagctttgcctgcaagactgcgaacggcacggctattcccatagggggaggttccgccaatgtttacgtgaaccttgcacctgtagtgaatgtcggccagaacctggtggttgatttgtctacccaaatcttctgtcataatgactatccagagacaattactgattacgtgaccttacagagggggtcagcctatggaggcgtcctgagtaactttagcggtacagtgaaatactccgggtcttcgtatccgttccccaccacttcagaaacacctcgggtagtttacaatagccgcaccgacaagccatggcccgtggctctatatctcacgcctgtcagttccgcaggaggcgtggccatcaaagctggctctctgattgccgtgcttatcctgcgacagactaacaattacaacagcgatgactttcagttcgtctggaatatatacgcgaacaatgatgttgtggtaccaaccgggggatgcgacgtgtccgcacgtgatgtcacagtgactttgcccgactatcctggttcagttccaatcccgctcaccgtgtactgtgccaagagtcaaaacctgggctattacctgagcgggacaaccgctgatgccggaaattctatttttacgaacactgcatccttctcacccgctcagggcgtcggtgtgcagctcacaagaaacgggaccatcattcctgccaataacactgttagcttaggagcggtaggcacaagtgccgtgtctctgggccttaccgcaaattatgctaggaccgggggacaggtcacggccggtaacgtgcaatccatcataggcgtcacatttgtgtaccagccaggggacggaaatgctgatgttactattaccgtgaacggcaaagtagtcgccaaggcaaagttgaatcgggaggaaatcgacggtgtgaaactggagagcacacgcatttatcagatcctagccatctactcgactgttgcttcttccctcgtgctggtcgtgtcacttggggcgattagtttctggatgtgcagcaacggctccctgcagtgtagaatatgcatctgatgatgaggactagtccctgttcccagagcccacttttttttctttttttgaaataaaatagcctgtctttcagatctaaaaaaaaaaaaaaaaaaaaaaaaaaaaaaaaaaaaaaaaaaaaaaaaaaaaaaaaaaaaaaaaaaaaaaaaaaaaaaaaaaaaaaaaaaaaaaaaaaaa

SEQ ID NO: 1187 - RNA, 1709 nt, synthetic construct
  misc_feature 1..1709: note Artificial____HsIgE(1-18)_LumSynth(1-154_C37A_N102D)_Linker (GGS)4-GGG_Ec(J96)-FimH(22-300)_Linker-PGDGN_Ec(J96)-FimG(2 4-37) mRNA opt3
  source 1..1709: mol_type = other RNA
aggagagtcccgcagtcggcgtccagcggctctgcttgttcgtgtgtgtgtcgttgcaggccttattcaagcttaccatggactggacctggatcctgttcctcgtggccgctgcaacaagagtccacagccagatttacgagggcaaacttactgccgaagggctgaggtttggaatagttgcgtcccggttcaaccatgctttggtggatcgcttagtagagggtgccatcgacgcaattgtgcgacacggcgggcgtgaagaggatatcacgctggtcagagtgcccggatcttgggaaattcctgttgccgctggcgagctagcaaggaaggaggacatcgatgccgtgatagctatcggtgtcctcattcgcggggccaccccacattttgactatatcgcgtcagaagtgagtaagggactggcagatcttagcctggagttgcggaaaccgattacattcggcgtaatcactgccgacaccctcgaacaagctatagagagagccggcacaaagcacgggaataaaggatgggaggcagctctgtccgccattgaaatggcgaacctgtttaagtctctcaggggtggctcagggggatcgggcggtagcgggggaagtggcggcgggttcgcctgcaagaccgcaaatggaactgctatccccattggtggcgggtccgccaacgtttacgtgaatttagctcctgtcgtgaacgtgggacagaatctggtcgttgatctttctacacagatcttttgtcataacgactatccagagaccatcacggattacgtgactttgcagcggggcagcgcctatggtggggtactgtccaatttctcaggcaccgtgaaatacagtggaagctcttatccctttcctacaacttccgaaaccccacgcgtcgtgtacaactcacgaacagacaagccctggcctgttgcactatacctcaccccagtgagcagtgccggcggggtcgctattaaagcgggatctctgatagcagtgcttatcctgagacaaacgaataactataattccgatgacttccagtttgtatggaacatttacgccaataacgacgttgtggtcccgactggtggctgcgatgtgagcgctagggacgtcacagtgaccttgcccgattatcctgggtcggttccaatccccctcactgtgtactgtgccaagtctcagaacctgggatattacttatccggcacaaccgcagacgccggtaattcaatattcacgaacaccgctagttttagccctgcccagggggtaggcgtccaactgacacggaatggaactattatcccagcaaacaataccgtgtccctcggcgcggttgggacatctgctgtgagccttggactgactgccaactatgcacgtaccggtggccaggtcacagccgggaatgtgcagtcaatcattggagtaaccttcgtgtaccagcccggcgatggtaacgctgacgttactatcacggtcaatgggaaagtggtggccaagtgatgatgaggactagtccctgttcccagagcccacttttttttctttttttgaaataaaatagcctgtctttcagatctaaaaaaaaaaaaaaaaaaaaaaaaaaaaaaaaaaaaaaaaaaaaaaaaaaaaaaaaaaaaaaaaaaaaaaaaaaaaaaaaaaaaaaaaaaaaaaaaaaaa

SEQ ID NO: 1188 - RNA, 1676 nt, synthetic construct
  misc_feature 1..1676: note Artificial____HsIgE(1-18)_Ec(J96)-FimH(22-300_N28S_N91S_N24 9Q)_Linker-PGDGN_Ec(J96)-FimG(24-37)_Linker-SGG_LumSynth(1- 154_C37A_N102D) mRNA opt3
  source 1..1676: mol_type = other RNA
aggagagtcccgcagtcggcgtccagcggctctgcttgttcgtgtgtgtgtcgttgcaggccttattcaagcttaccatggactggacctggatcctgttcctcgtggccgctgcaacaagagtccacagctttgcctgcaagactgcgtccggcacggctattcccatagggggaggttctgccaacgtttacgtgaatcttgcacctgtagtgaacgtcggccagaatctggtggttgatttgtcaacccaaatcttctgtcataacgactatccagagacaattactgattacgtgaccttacagagggggagtgcctatggaggcgtcctgagctccttttctggtacagtgaaatactcggggtcaagctatccgttccccaccacgagtgaaacacctcgggtagtttacaattcccgcaccgacaagccatggcccgtggctctatatctcacgcctgtctctagcgcaggaggcgtggccatcaaagctggctccctgattgccgtgcttatcctgcgacagactaacaattacaactcagatgactttcagttcgtctggaatatatacgcgaacaatgatgttgtggtaccaaccgggggatgcgacgtgagtgcacgtgatgtcacagtgactttgcccgactatcctggtagcgttccaatcccgctcaccgtgtactgtgccaagtctcaaaacctgggctattacctgtccgggacaaccgctgatgccggaaattcaatttttacgaacactgctagcttcagtcccgcacagggcgtcggtgtgcagctcacaagacaggggaccatcattcctgccaataacactgtatctttaggagcggttggcacatccgccgtgagcctgggccttaccgcaaactatgctaggactgggggacaagtcaccgccggtaatgtgcagtcgatcataggcgtcacatttgtgtaccagccaggggacggaaacgctgatgttactattaccgtgaatggcaaagtagtcgccaagtctggtgggatgcagatctatgagggcaagttgacagcagaaggactgcggttcggcattgtggcctcccgctttaaccacgctctagttgacagactcgtggagggggcgatcgacgcaatcgtcaggcatggaggtcgggaagaggatattactctggtgcgcgtacccggctcatgggagatacctgtggccgctggggaacttgcccgaaaagaggacatcgatgcagttattgccatcggagtcctgataagaggcgctaccccacacttcgactacattgccagtgaagtgagcaagggtttggcagatctctccctggagttaaggaaacccatcacatttggggtgatcaccgcggacactctggagcaagctattgaacgggccggcacgaagcatggaaataaaggctgggaggcagccctctctgctatcgaaatggccaaccttttcaagagcctgcgttgatgatgaggactagtccctgttcccagagcccacttttttttctttttttgaaataaaatagcctgtctttcagatctaaaaaaaaaaaaaaaaaaaaaaaaaaaaaaaaaaaaaaaaaaaaaaaaaaaaaaaaaaaaaaaaaaaaaaaaaaaaaaaaaaaaaaaaaaaaaaaaaaaa

SEQ ID NO: 1189 - RNA, 1676 nt, synthetic construct
  misc_feature 1..1676: note Artificial____HsIgE(1-18)_Ec(J96)-FimH(22-300_N28S_N91S_N24 9Q_N256D)_Linker-PGDGN_Ec(J96)-FimG(24-37)_Linker-SGG_LumSy nth(1-154_C37A_N102D) mRNA opt3
  source 1..1676: mol_type = other RNA
aggagagtcccgcagtcggcgtccagcggctctgcttgttcgtgtgtgtgtcgttgcaggccttattcaagcttaccatggactggacctggatcctgttcctcgtggccgctgcaacaagagtccacagctttgcctgcaagactgcgtccggcacggctattcccatagggggaggttctgccaacgtttacgtgaatcttgcacctgtagtgaacgtcggccagaatctggtggttgatttgtcaacccaaatcttctgtcataacgactatccagagacaattactgattacgtgaccttacagagggggagtgcctatggaggcgtcctgagctccttttctggtacagtgaaatactcggggtcaagctatccgttccccaccacgagtgaaacacctcgggtagtttacaattcccgcaccgacaagccatggcccgtggctctatatctcacgcctgtctctagcgcaggaggcgtggccatcaaagctggctccctgattgccgtgcttatcctgcgacagactaacaattacaactcagatgactttcagttcgtctggaatatatacgcgaacaatgatgttgtggtaccaaccgggggatgcgacgtgagtgcacgtgatgtcacagtgactttgcccgactatcctggtagcgttccaatcccgctcaccgtgtactgtgccaagtctcaaaacctgggctattacctgtccgggacaaccgctgatgccggaaattcaatttttacgaacactgctagcttcagtcccgcacagggcgtcggtgtgcagctcacaagacaggggaccatcattcctgccgacaatactgtatctttaggagcggttggcacatccgccgtgagcctgggccttaccgcaaactatgctaggactgggggacaagtcaccgccggtaacgtgcagtcgatcataggcgtcacatttgtgtaccagccaggggatggaaatgctgacgttactattaccgtgaacggcaaagtagtcgccaagtctggtgggatgcagatctatgagggcaagttgacagcagaaggactgcggttcggcattgtggcctcccgctttaatcacgctctagttgacagactcgtggagggggcgatcgatgcaatcgtcaggcatggaggtcgggaagaggacattactctggtgcgcgtacccggctcatgggagatacctgtggccgctggggaacttgcccgaaaagaggatatcgacgcagttattgccatcggagtcctgataagaggcgctaccccacacttcgattacattgccagtgaagtgagcaagggtttggcagacctctccctggagttaaggaaacccatcacatttggggtgatcaccgcggatactctggagcaagctattgaacgggccggcacgaagcatggaaacaaaggctgggaggcagccctctctgctatcgaaatggccaatcttttcaagagcctgcgttgatgatgaggactagtccctgttcccagagcccacttttttttctttttttgaaataaaatagcctgtctttcagatctaaaaaaaaaaaaaaaaaaaaaaaaaaaaaaaaaaaaaaaaaaaaaaaaaaaaaaaaaaaaaaaaaaaaaaaaaaaaaaaaaaaaaaaaaaaaaaaaaaaa

SEQ ID NO: 1190 - RNA, 1676 nt, synthetic construct
  misc_feature 1..1676: note Artificial____HsIgE(1-18)_Ec(J96)-FimH(22-300_N28S_V48C_L55 C_N91S_N249Q)_Linker-PGDGN_Ec(J96)-FimG(24-37)_Linker-SGG_L umSynth(1-154_C37A_N102D) mRNA opt3
  source 1..1676: mol_type = other RNA
aggagagtcccgcagtcggcgtccagcggctctgcttgttcgtgtgtgtgtcgttgcaggccttattcaagcttaccatggactggacctggatcctgttcctcgtggccgctgcaacaagagtccacagctttgcctgcaagactgcgtccggcacggctattcccatagggggaggttctgccaacgtttacgtgaatcttgcaccttgtgtaaacgtgggccagaattgcgtcgtggatctgtcaacccaaatcttctgtcataacgactatccagagacaattactgattacgttaccttgcagagggggagtgcctatggaggcgtgttaagctccttttctggtacagtcaaatactcggggtcaagctatccgttccccaccacgagtgaaacacctcgggtggtatacaattcccgcaccgacaagccatggcccgttgctctgtatctaacgcctgtgtctagcgcaggaggcgtcgccatcaaagctggctccctcattgccgtgctgatccttcgacagactaacaattacaactcagatgactttcagttcgtgtggaatatatacgcgaacaatgatgtcgttgtgccaaccgggggatgcgacgtaagtgcacgtgatgtgacagtcactctgcccgactatcctggtagcgtgccaatcccgttgaccgtttactgtgccaagtctcaaaacctcggctattacctgtccgggacaaccgctgatgccggaaattcaatttttacgaacactgctagcttcagtcccgcacagggcgtgggtgtccagctgacaagacaggggaccatcattcctgccaataacactgtgtctctcggagcggtaggcacatccgccgttagcttaggcctgaccgcaaactatgctaggactgggggacaagtgaccgccggtaatgtccagtcgatcataggcgtgacatttgtctaccagccaggggacggaaacgctgatgtgactattaccgttaatggcaaagtggtagccaagtctggtgggatgcagatctatgagggcaagctaacagcagaaggattgcggttcggcattgtcgcctcccgctttaaccacgctctggtggacagacttgttgagggggcgatcgacgcaatcgtgaggcatggaggtcgggaagaggatattactctcgtccgcgtgcccggctcatgggagatacctgtagccgctggggaactggcccgaaaagaggacatcgatgcagtgattgccatcggagttcttataagaggcgctaccccacacttcgactacattgccagtgaagtcagcaagggtctggcagatttgtccctcgagctgaggaaacccatcacatttggggtgatcaccgcggacactttagagcaagctattgaacgggccggcacgaagcatggaaataaaggctgggaggcagccctgtctgctatcgaaatggccaacctcttcaagagccttcgttgatgatgaggactagtccctgttcccagagcccacttttttttctttttttgaaataaaatagcctgtctttcagatctaaaaaaaaaaaaaaaaaaaaaaaaaaaaaaaaaaaaaaaaaaaaaaaaaaaaaaaaaaaaaaaaaaaaaaaaaaaaaaaaaaaaaaaaaaaaaaaaaaaa

SEQ ID NO: 1191 - RNA, 1676 nt, synthetic construct
  misc_feature 1..1676: note Artificial____HsIgE(1-18)_Ec(J96)-FimH(22-300_F165V)_Linker -PGDGN_Ec(J96)-FimG(24-37)_Linker-SGG_LumSynth(1-154_C37A_N 102D) mRNA opt3
  source 1..1676: mol_type = other RNA
aggagagtcccgcagtcggcgtccagcggctctgcttgttcgtgtgtgtgtcgttgcaggccttattcaagcttaccatggactggacctggatcctgttcctcgtggccgctgcaacaagagtccacagctttgcctgcaagactgcgaacggcacggctattcccatagggggaggttccgccaatgtttacgtgaaccttgcacctgtagtgaatgtcggccagaacctggtggttgatttgtctacccaaatcttctgtcataatgactatccagagacaattactgattacgtgaccttacagagggggtcagcctatggaggcgtcctgagtaactttagcggtacagtgaaatactccgggtcttcgtatccgttccccaccacttcagaaacacctcgggtagtttacaatagccgcaccgacaagccatggcccgtggctctatatctcacgcctgtcagttccgcaggaggcgtggccatcaaagctggctctctgattgccgtgcttatcctgcgacagactaacaattacaacagcgatgactttcaggtcgtttggaatatatacgcgaacaatgatgtggtagtgccaaccgggggatgcgacgtctccgcacgtgatgtgacagttactttgcccgactatcctggttcagtgccaatcccgctcaccgtctactgtgccaagagtcaaaacctgggctattacctgagcgggacaaccgctgatgccggaaattctattttcacgaacactgcatccttttcacccgctcagggcgtgggtgtacagctcacaagaaacgggaccatcattcctgccaataacactgttagcttaggagcggtgggcacaagtgccgtctctctgggccttaccgcaaattatgctaggaccgggggacaggtgacggccggtaacgtccaatccatcataggcgtgacattcgtttaccagccaggggacggaaatgctgatgtgactattaccgtaaacggcaaagtcgtggccaagagcggtgggatgcagatctatgagggcaagttgacagcagaaggactgcggtttggcattgttgcctcgcgcttcaatcacgctctagtggacagactcgtcgagggggcgatcgacgcaatcgtgaggcatggaggtcgggaagaggatattactctggtacgcgtgcccggctcttgggagatacctgttgccgctggggaacttgcccgaaaagaggacatcgatgcagtcattgccatcggagtgctgataagaggcgctaccccacactttgactacattgcctccgaagtgtcaaagggtttggcagatctcagtctggagttaaggaaacccatcacattcggggtcatcaccgcggacactctggagcaggctattgaacgggccggcacgaagcatggaaacaaaggctgggaggcagccctcagcgctatcgaaatggccaatctttttaagtccctgcgttgatgatgaggactagtccctgttcccagagcccacttttttttctttttttgaaataaaatagcctgtctttcagatctaaaaaaaaaaaaaaaaaaaaaaaaaaaaaaaaaaaaaaaaaaaaaaaaaaaaaaaaaaaaaaaaaaaaaaaaaaaaaaaaaaaaaaaaaaaaaaaaaaaa

SEQ ID NO: 1192 - RNA, 1703 nt, synthetic construct
  misc_feature 1..1703: note Artificial____HsIgE(1-18)_Ec(J96)-FimH(22-300_N28S_N91S_N24 9Q)_Linker-PGDGN_Ec(J96)-FimG(24-37)_Linker-SGG_Ferritin(5- 167_N19Q) mRNA opt3
  source 1..1703: mol_type = other RNA
aggagagtcccgcagtcggcgtccagcggctctgcttgttcgtgtgtgtgtcgttgcaggccttattcaagcttaccatggactggacctggatcctgttcctcgtggccgctgcaacaagagtccacagctttgcctgcaagactgcgtccggcacggctattcccatagggggaggttctgccaacgtttacgtgaatcttgcacctgtagtgaacgtcggccagaatctggtggttgatttgtcaacccaaatcttctgtcataacgactatccagagacaattactgattacgtgaccttacagagggggagtgcctatggaggcgtcctgagctccttttctggtacagtgaaatactcggggtcaagctatccgttccccaccacgagtgaaacacctcgggtagtttacaattcccgcaccgacaagccatggcccgtggctctatatctcacgcctgtctctagcgcaggaggcgtggccatcaaagctggctccctgattgccgtgcttatcctgcgacagactaacaattacaactcagatgactttcagttcgtctggaatatatacgcgaacaatgatgttgtggtaccaaccgggggatgcgacgtgagtgcacgtgatgtcacagtgactttgcccgactatcctggtagcgttccaatcccgctcaccgtgtactgtgccaagtctcaaaacctgggctattacctgtccgggacaaccgctgatgccggaaattcaatttttacgaacactgctagcttcagtcccgcacagggcgtcggtgtgcagctcacaagacaggggaccatcattcctgccaataacactgtatctttaggagcggttggcacatccgccgtgagcctgggccttaccgcaaactatgctaggactgggggacaagtcaccgccggtaatgtgcagtcgatcataggcgtcacatttgtgtaccagccaggggacggaaacgctgatgttactattaccgtgaatggcaaagtagtcgccaagtctggtggggacatcattaagttgctgaacgaacaggtgaataaagagatgcaatcctcaaacctatatatgagtatgagctcctggtgctacacacactctctcgacggcgcaggactgttcctttttgatcatgccgctgaggaatacgagcacgcgaagaaactgatcatcttcttgaatgagaacaatgttcccgtgcagctcactagcatttcagcacctgaacataagtttgagggcctgacccagatattccaaaaagcctatgaacacgagcagcacatcagtgagtccattaacaatatcgtcgaccatgctataaagagcaaggatcacgccacattcaactttttacagtggtacgtggcagaacagcatgaggaagaggtactgttcaaagacattctcgataagatcgaacttatcgggaatgagaaccacggactgtatttggccgaccaatacgtgaaaggtattgctaagtctcggaaatcatgatgatgaggactagtccctgttcccagagcccacttttttttctttttttgaaataaaatagcctgtctttcagatctaaaaaaaaaaaaaaaaaaaaaaaaaaaaaaaaaaaaaaaaaaaaaaaaaaaaaaaaaaaaaaaaaaaaaaaaaaaaaaaaaaaaaaaaaaaaaaaaaaaa

SEQ ID NO: 1193 - RNA, 1703 nt, synthetic construct
  misc_feature 1..1703: note Artificial____HsIgE(1-18)_Ec(J96)-FimH(22-300_N28S_N91S_N24 9Q_N256D)_Linker-PGDGN_Ec(J96)-FimG(24-37)_Linker-SGG_Ferri tin(5-167_N19Q) mRNA opt3
  source 1..1703: mol_type = other RNA
aggagagtcccgcagtcggcgtccagcggctctgcttgttcgtgtgtgtgtcgttgcaggccttattcaagcttaccatggactggacctggatcctgttcctcgtggccgctgcaacaagagtccacagctttgcctgcaagactgcgtccggcacggctattcccatagggggaggttctgccaacgtttacgtgaatcttgcacctgtagtgaacgtcggccagaatctggtggttgatttgtcaacccaaatcttctgtcataacgactatccagagacaattactgattacgtgaccttacagagggggagtgcctatggaggcgtcctgagctccttttctggtacagtgaaatactcggggtcaagctatccgttccccaccacgagtgaaacacctcgggtagtttacaattcccgcaccgacaagccatggcccgtggctctatatctcacgcctgtctctagcgcaggaggcgtggccatcaaagctggctccctgattgccgtgcttatcctgcgacagactaacaattacaactcagatgactttcagttcgtctggaatatatacgcgaacaatgatgttgtggtaccaaccgggggatgcgacgtgagtgcacgtgatgtcacagtgactttgcccgactatcctggtagcgttccaatcccgctcaccgtgtactgtgccaagtctcaaaacctgggctattacctgtccgggacaaccgctgatgccggaaattcaatttttacgaacactgctagcttcagtcccgcacagggcgtcggtgtgcagctcacaagacaggggaccatcattcctgccgacaatactgtatctttaggagcggttggcacatccgccgtgagcctgggccttaccgcaaactatgctaggactgggggacaagtcaccgccggtaacgtgcagtcgatcataggcgtcacatttgtgtaccagccaggggatggaaatgctgacgttactattaccgtgaacggcaaagtagtcgccaagtctggtggggacatcattaagttgctgaatgaacaggtgaacaaagagatgcaatcctcaaatctatatatgagtatgagctcctggtgctacacacactctctcgatggcgcaggactgttcctttttgaccatgccgctgaggaatacgagcacgcgaagaaactgatcatcttcttgaacgagaataacgttcccgtgcagctcactagcatttcagcacctgaacataagtttgagggcctgacccagatattccaaaaagcctatgaacacgagcagcacatcagtgagtccattaataacatcgtcgatcatgctataaagagcaaggaccacgccacattcaactttttacagtggtacgtggcagaacagcatgaggaagaggtactgttcaaagatattctcgacaagatcgaacttatcgggaatgagaatcacggactgtatttggccgatcaatacgtgaaaggtattgctaagtctcggaaatcatgatgatgaggactagtccctgttcccagagcccacttttttttctttttttgaaataaaatagcctgtctttcagatctaaaaaaaaaaaaaaaaaaaaaaaaaaaaaaaaaaaaaaaaaaaaaaaaaaaaaaaaaaaaaaaaaaaaaaaaaaaaaaaaaaaaaaaaaaaaaaaaaaaa

SEQ ID NO: 1194 - RNA, 1703 nt, synthetic construct
  misc_feature 1..1703: note Artificial____HsIgE(1-18)_Ec(J96)-FimH(22-300_N28S_V48C_L55 C_N91S_N249Q)_Linker-PGDGN_Ec(J96)-FimG(24-37)_Linker-SGG_F erritin(5-167_N19Q) mRNA opt3
  source 1..1703: mol_type = other RNA
aggagagtcccgcagtcggcgtccagcggctctgcttgttcgtgtgtgtgtcgttgcaggccttattcaagcttaccatggactggacctggatcctgttcctcgtggccgctgcaacaagagtccacagctttgcctgcaagactgcgtccggcacggctattcccatagggggaggttctgccaacgtttacgtgaatcttgcaccttgtgtaaacgtgggccagaattgcgtcgtggatctgtcaacccaaatcttctgtcataacgactatccagagacaattactgattacgttaccttgcagagggggagtgcctatggaggcgtgttaagctccttttctggtacagtcaaatactcggggtcaagctatccgttccccaccacgagtgaaacacctcgggtggtatacaattcccgcaccgacaagccatggcccgttgctctgtatctaacgcctgtgtctagcgcaggaggcgtcgccatcaaagctggctccctcattgccgtgctgatccttcgacagactaacaattacaactcagatgactttcagttcgtgtggaatatatacgcgaacaatgatgtcgttgtgccaaccgggggatgcgacgtaagtgcacgtgatgtgacagtcactctgcccgactatcctggtagcgtgccaatcccgttgaccgtttactgtgccaagtctcaaaacctcggctattacctgtccgggacaaccgctgatgccggaaattcaatttttacgaacactgctagcttcagtcccgcacagggcgtgggtgtccagctgacaagacaggggaccatcattcctgccaataacactgtgtctctcggagcggtaggcacatccgccgttagcttaggcctgaccgcaaactatgctaggactgggggacaagtgaccgccggtaatgtccagtcgatcataggcgtgacatttgtctaccagccaggggacggaaacgctgatgtgactattaccgttaatggcaaagtggtagccaagtctggtggggacatcattaaacttttgaacgagcaggtcaataaggaaatgcaatcctcaaacctgtatatgagtatgagctcctggtgctacacacactctctagacggcgcaggactcttcctgtttgatcatgccgctgaggaatacgagcacgcgaagaaacttatcatcttcctgaatgagaacaatgtgcccgttcagttgactagcatttcagcacctgaacataagtttgagggcctcacccagatattccaaaaagcctatgaacacgagcagcacatcagtgagtccattaacaatatcgtggaccatgctataaagagcaaggatcacgccacattcaactttctgcagtggtacgtcgcagaacagcatgaggaagaggtgttattcaaagacattctggataagatcgaactcatcgggaatgagaaccacggactttatctggccgaccaatacgtaaaaggtattgctaagtctcggaaatcatgatgatgaggactagtccctgttcccagagcccacttttttttctttttttgaaataaaatagcctgtctttcagatctaaaaaaaaaaaaaaaaaaaaaaaaaaaaaaaaaaaaaaaaaaaaaaaaaaaaaaaaaaaaaaaaaaaaaaaaaaaaaaaaaaaaaaaaaaaaaaaaaaaa

SEQ ID NO: 1195 - RNA, 1703 nt, synthetic construct
  misc_feature 1..1703: note Artificial____HsIgE(1-18)_Ec(J96)-FimH(22-300_F165V)_Linker -PGDGN_Ec(J96)-FimG(24-37)_Linker-SGG_Ferritin(5-167_N19Q) mRNA opt3
  source 1..1703: mol_type = other RNA
aggagagtcccgcagtcggcgtccagcggctctgcttgttcgtgtgtgtgtcgttgcaggccttattcaagcttaccatggactggacctggatcctgttcctcgtggccgctgcaacaagagtccacagctttgcctgcaagactgcgaacggcacggctattcccatagggggaggttccgccaatgtttacgtgaaccttgcacctgtagtgaatgtcggccagaacctggtggttgatttgtctacccaaatcttctgtcataatgactatccagagacaattactgattacgtgaccttacagagggggtcagcctatggaggcgtcctgagtaactttagcggtacagtgaaatactccgggtcttcgtatccgttccccaccacttcagaaacacctcgggtagtttacaatagccgcaccgacaagccatggcccgtggctctatatctcacgcctgtcagttccgcaggaggcgtggccatcaaagctggctctctgattgccgtgcttatcctgcgacagactaacaattacaacagcgatgactttcaggtcgtttggaatatatacgcgaacaatgatgtggtagtgccaaccgggggatgcgacgtctccgcacgtgatgtgacagttactttgcccgactatcctggttcagtgccaatcccgctcaccgtctactgtgccaagagtcaaaacctgggctattacctgagcgggacaaccgctgatgccggaaattctattttcacgaacactgcatccttttcacccgctcagggcgtgggtgtacagctcacaagaaacgggaccatcattcctgccaataacactgttagcttaggagcggtgggcacaagtgccgtctctctgggccttaccgcaaattatgctaggaccgggggacaggtgacggccggtaacgtccaatccatcataggcgtgacattcgtttaccagccaggggacggaaatgctgatgtgactattaccgtaaacggcaaagtcgtggccaagagcggtggggacatcattaagttgctgaatgagcaggttaacaaagaaatgcagtcgtctaatctatatatgtccatgtcaagttggtgctacacacacagcctcgacggcgcaggactgtttcttttcgatcatgccgctgaggaatacgagcacgcgaagaaactgatcatctttttgaacgagaataacgtgcccgtccaactcacttccatttctgcacctgaacataagttcgagggcctgacccagatatttcagaaagcctatgaacacgagcaacacatcagcgagtcaattaataacatcgtggaccatgctataaagagtaaggatcacgccacattcaatttcttacagtggtacgtagcagaacagcatgaggaagaggtgctgtttaaagacattctcgataagatcgaacttatcgggaacgagaaccacggactgtatttggccgaccagtacgttaaaggtattgctaagtcccggaaaagctgatgatgaggactagtccctgttcccagagcccacttttttttctttttttgaaataaaatagcctgtctttcagatctaaaaaaaaaaaaaaaaaaaaaaaaaaaaaaaaaaaaaaaaaaaaaaaaaaaaaaaaaaaaaaaaaaaaaaaaaaaaaaaaaaaaaaaaaaaaaaaaaaaa

SEQ ID NO: 1196 - RNA, 980 nt, synthetic construct
  misc_feature 1..980: note Artificial____Ec(J96)-FimC(1-36)_Ec(J96)-FimC(37-241) mRNA opt3
  source 1..980: mol_type = other RNA
aggagagtcccgcagtcggcgtccagcggctctgcttgttcgtgtgtgtgtcgttgcaggccttattcaagcttaccatgagcaacaagaacgtgaacgtgcggaagtcccaagagatcaccttctgtctgctggccggcatcctgatgtttatggccatgatggtggccggcagagccgaagctggtgttgctcttggagccaccagagtgatctacccagccggccagaaacaggtgcagctggccgtgaccaacaacgacgagaacagcacctacctgatccagagctgggtcgagaatgccgacggcgtgaaggacggcagattcatcgttacccctccactgttcgccatgaagggcaagaaagagaacaccctgcggatcctggacgccaccaacaatcagctgccccaggacagagaaagcctgttctggatgaacgtgaaggctatccccagcatggacaagagcaagctgaccgagaataccctgcagctcgccatcatcagccggatcaagctgtactacagacccgccaaactggccctgcctccagatcaggctgccgagaaactgcggttcagaagaagcgccaacagcctgacactgatcaaccccacaccttactacctgaccgtgaccgagctgaacgccggcacaagagtgctggaaaatgccctggttcctcctatgggcgagagcaccgtgaagctgccatctgatgccggctccaacatcacctaccggaccatcaacgactacggcgccctgacacctaagatgaccggcgtgatggaatgatgatgaggactagtccctgttcccagagcccacttttttttctttttttgaaataaaatagcctgtctttcagatctaaaaaaaaaaaaaaaaaaaaaaaaaaaaaaaaaaaaaaaaaaaaaaaaaaaaaaaaaaaaaaaaaaaaaaaaaaaaaaaaaaaaaaaaaaaaaaaaaaaa

SEQ ID NO: 1197 - RNA, 926 nt, synthetic construct
  misc_feature 1..926: note = Artificial____HsIgE(1-18)_Ec(J96)-FimC(37-241) mRNA opt3
  source 1..926: mol_type = other RNA
aggagagtcccgcagtcggcgtccagcggctctgcttgttcgtgtgtgtgtcgttgcaggccttattcaagcttaccatggactggacctggatcctgtttctggtggccgctgccacaagagtgcatagcggagttgctctgggagccaccagagtgatctatcctgccggccagaagcaggttcagctggccgtgaccaacaacgacgagaacagcacctacctgatccagagctgggtcgagaatgccgacggcgtgaaggacggcagattcatcgttacccctccactgttcgccatgaagggcaagaaagagaacaccctgcggatcctggacgccaccaacaatcagctgccccaggacagagaaagcctgttctggatgaacgtgaaggctatccccagcatggacaagagcaagctgaccgagaataccctgcagctggccatcatcagccggatcaagctgtactacagacccgccaaactggccctgcctccagatcaggctgccgagaaactgcggttcagaagaagcgccaacagcctgacactgatcaaccccacaccttactacctgaccgtgaccgagctgaacgccggaaccagagtgctggaaaatgccctggttcctcctatgggcgagagcaccgtgaagctgccatctgatgccggcagcaacatcacctaccggaccatcaacgactacggcgccctgacacctaagatgaccggcgtgatggaatgatgatgaggactagtccctgttcccagagcccacttttttttctttttttgaaataaaatagcctgtctttcagatctaaaaaaaaaaaaaaaaaaaaaaaaaaaaaaaaaaaaaaaaaaaaaaaaaaaaaaaaaaaaaaaaaaaaaaaaaaaaaaaaaaaaaaaaaaaaaaaaaaaa

SEQ ID NO: 1198 - RNA, 1157 nt, synthetic construct
  misc_feature 1..1157: note Artificial____Ec(J96)-FimH(1-21)_Ec(J96)-FimH(22-300) mRNA opt3
  source 1..1157: mol_type = other RNA
aggagagtcccgcagtcggcgtccagcggctctgcttgttcgtgtgtgtgtcgttgcaggccttattcaagcttaccatgaagcgcgtgatcaccctgtttgccgtgctgcttatgggctggagcgtgaacgcctggtcctttgcctgcaagaccgccaacggaaccgccattcctatcggcggaggatccgccaatgtgtatgtgaatctggcccctgtggtcaacgtgggccagaacctggtggtggatctgagcacccagatcttttgccacaacgactaccccgagacaatcaccgactacgtgaccctgcagagaggctctgcttacggcggcgtgctgagcaatttttccggcaccgtgaagtacagcggcagcagctacccatttcctaccaccagcgagacacccagagtggtgtacaacagcagaaccgacaagccctggcctgtggctctgtacctgacacctgttagctctgctggcggcgtggccattaaggccggatctctgatcgccgtgctgatcctgagacagaccaacaactacaacagcgacgacttccagttcgtgtggaacatctacgccaacaacgacgtggtggtgcctacaggcggctgtgatgtgtctgccagagatgtgaccgtgacactgcctgactaccctggcagcgtgccaattcctctgaccgtgtactgtgccaagagccagaatctgggctactacctgagcggcacaacagccgatgccggcaacagcatcttcaccaacaccgccagcttcagccctgctcaaggtgttggagtgcagctgacccggaacggcacaatcatccccgccaacaataccgtgtctctgggcgctgttggcaccagcgctgtttctctgggactgaccgccaattacgccagaacaggcggacaagtgaccgccggcaatgtgcagtctatcatcggcgtgaccttcgtgtaccagtgatgatgaggactagtccctgttcccagagcccacttttttttctttttttgaaataaaatagcctgtctttcagatctaaaaaaaaaaaaaaaaaaaaaaaaaaaaaaaaaaaaaaaaaaaaaaaaaaaaaaaaaaaaaaaaaaaaaaaaaaaaaaaaaaaaaaaaaaaaaaaaaaaa

SEQ ID NO: 1199 - RNA, 1148 nt, synthetic construct
  misc_feature 1..1148: note = Artificial____HsIgE(1-18)_Ec(J96)-FimH(22-300) mRNA opt3
  source 1..1148: mol_type = other RNA
aggagagtcccgcagtcggcgtccagcggctctgcttgttcgtgtgtgtgtcgttgcaggccttattcaagcttaccatggactggacctggatcctgtttctggtggccgctgccacaagagtgcacagctttgcctgcaagaccgccaacggcaccgccattcctattggcggaggatccgccaatgtgtatgtgaatctggcccctgtggtcaacgtgggccagaacctggtggtggatctgagcacccagatcttttgccacaacgactaccccgagacaatcaccgactacgtgaccctgcagagaggctctgcttacggcggcgtgctgagcaatttttccggcaccgtgaagtacagcggcagcagctacccatttcctaccaccagcgagacacccagagtggtgtacaacagcagaaccgacaagccctggcctgtggctctgtacctgacacctgttagctctgctggcggcgtggccattaaggccggatctctgattgccgtgctgatcctgcggcagaccaacaactacaacagcgacgacttccagttcgtgtggaacatctacgccaacaacgacgtggtggtgcctacaggcggctgtgatgtgtctgccagagatgtgaccgtgacactgcctgactaccctggcagcgtgccaattcctctgaccgtgtactgtgccaagagccagaatctgggctactacctgagcggcacaacagccgatgccggcaacagcatcttcaccaacaccgccagcttcagccctgctcaaggtgttggagtgcagctgacccggaacggcacaatcatccccgccaacaataccgtgtctctgggcgctgttggcaccagcgctgtttctctgggactgaccgccaattacgccagaacaggcggacaagtgaccgccggcaatgtgcagtctatcatcggcgtgaccttcgtgtaccagtgatgatgaggactagtccctgttcccagagcccacttttttttctttttttgaaataaaatagcctgtctttcagatctaaaaaaaaaaaaaaaaaaaaaaaaaaaaaaaaaaaaaaaaaaaaaaaaaaaaaaaaaaaaaaaaaaaaaaaaaaaaaaaaaaaaaaaaaaaaaaaaaaaa

SEQ ID NO: 1200 - RNA, 1154 nt, synthetic construct
  misc_feature 1..1154: note = Artificial____MmIgK(1-20)_Ec(J96)-FimH(22-300) mRNA opt3
  source 1..1154: mol_type = other RNA
aggagagtcccgcagtcggcgtccagcggctctgcttgttcgtgtgtgtgtcgttgcaggccttattcaagcttaccatggaaaccgacacactgctgctgtgggtgctgcttctttgggtgcccggctctacaggctttgcctgcaagacagccaacggcaccgccattcctatcggcggaggatccgccaatgtgtatgtgaatctggcccctgtggtcaacgtgggccagaacctggtggtggatctgagcacccagatcttttgccacaacgactaccccgagacaatcaccgactacgtgaccctgcagagaggctctgcttacggcggcgtgctgagcaatttttccggcaccgtgaagtacagcggcagcagctacccatttcctaccaccagcgagacacccagagtggtgtacaacagcagaaccgacaagccctggcctgtggctctgtacctgacacctgttagctctgctggcggcgtggccattaaggccggatctctgattgccgtgctgatcctgcggcagaccaacaactacaacagcgacgacttccagttcgtgtggaacatctacgccaacaacgacgtggtggtgcctacaggcggctgtgatgtgtctgccagagatgtgaccgtgacactgcctgactaccctggcagcgtgccaattcctctgaccgtgtactgtgccaagagccagaatctgggctactacctgagcggcacaacagccgatgccggcaacagcatcttcaccaacaccgccagcttcagccctgctcaaggtgttggagtgcagctgacccggaacggcacaatcatccccgccaacaataccgtgtctctgggcgctgttggcaccagcgctgtttctctgggactgaccgccaactacgccagaacaggcggacaagtgacagccggcaatgtgcagtctatcatcggcgtgaccttcgtgtaccagtgatgatgaggactagtccctgttcccagagcccacttttttttctttttttgaaataaaatagcctgtctttcagatctaaaaaaaaaaaaaaaaaaaaaaaaaaaaaaaaaaaaaaaaaaaaaaaaaaaaaaaaaaaaaaaaaaaaaaaaaaaaaaaaaaaaaaaaaaaaaaaaaaaa

SEQ ID NO: 1201 - RNA, 1214 nt, synthetic construct
  misc_feature 1..1214: note Artificial____Ec(J96)-FimH(1-21)_Ec(J96)-FimH(22-300)_Linke r-PGDGN_Ec(J96)-FimG(24-37) mRNA opt3
  source 1..1214: mol_type = other RNA
aggagagtcccgcagtcggcgtccagcggctctgcttgttcgtgtgtgtgtcgttgcaggccttattcaagcttaccatgaagcgcgtgatcaccctgtttgccgtgctgcttatgggctggagcgtgaacgcctggtcctttgcctgcaagaccgccaacggaaccgccattcctatcggcggaggatccgccaatgtgtatgtgaatctggcccctgtggtcaacgtgggccagaacctggtggtggatctgagcacccagatcttttgccacaacgactaccccgagacaatcaccgactacgtgaccctgcagagaggctctgcttacggcggcgtgctgagcaatttttccggcaccgtgaagtacagcggcagcagctacccatttcctaccaccagcgagacacccagagtggtgtacaacagcagaaccgacaagccctggcctgtggctctgtacctgacacctgttagctctgctggcggcgtggccattaaggccggatctctgatcgccgtgctgatcctgagacagaccaacaactacaacagcgacgacttccagttcgtgtggaacatctacgccaacaacgacgtggtggtgcctacaggcggctgtgatgtgtctgccagagatgtgaccgtgacactgcctgactaccctggcagcgtgccaattcctctgaccgtgtactgtgccaagagccagaatctgggctactacctgagcggcacaacagccgatgccggcaacagcatcttcaccaacaccgccagcttcagccctgctcaaggtgttggagtgcagctgacccggaacggcacaatcatccccgccaacaataccgtgtctctgggcgctgttggcaccagcgctgtttctctgggactgaccgccaattacgccagaacaggcggacaagtgaccgccggcaatgtgcagtctatcatcggcgtgaccttcgtgtaccagcctggcgacggaaatgccgacgtgaccatcaccgtgaacggaaaggtggtggccaagtgatgatgaggactagtccctgttcccagagcccacttttttttctttttttgaaataaaatagcctgtctttcagatctaaaaaaaaaaaaaaaaaaaaaaaaaaaaaaaaaaaaaaaaaaaaaaaaaaaaaaaaaaaaaaaaaaaaaaaaaaaaaaaaaaaaaaaaaaaaaaaaaaaa

SEQ ID NO: 1202 - RNA, 1205 nt, synthetic construct
  misc_feature 1..1205: note Artificial____HsIgE(1-18)_Ec(J96)-FimH(22-300)_Linker-PGDGN _Ec(J96)-FimG(24-37) mRNA opt3
  source 1..1205: mol_type = other RNA
aggagagtcccgcagtcggcgtccagcggctctgcttgttcgtgtgtgtgtcgttgcaggccttattcaagcttaccatggactggacctggatcctgtttctggtggccgctgccacaagagtgcacagctttgcctgcaagaccgccaacggcaccgccattcctattggcggaggatccgccaatgtgtatgtgaatctggcccctgtggtcaacgtgggccagaacctggtggtggatctgagcacccagatcttttgccacaacgactaccccgagacaatcaccgactacgtgaccctgcagagaggctctgcttacggcggcgtgctgagcaatttttccggcaccgtgaagtacagcggcagcagctacccatttcctaccaccagcgagacacccagagtggtgtacaacagcagaaccgacaagccctggcctgtggctctgtacctgacacctgttagctctgctggcggcgtggccattaaggccggatctctgattgccgtgctgatcctgcggcagaccaacaactacaacagcgacgacttccagttcgtgtggaacatctacgccaacaacgacgtggtggtgcctacaggcggctgtgatgtgtctgccagagatgtgaccgtgacactgcctgactaccctggcagcgtgccaattcctctgaccgtgtactgtgccaagagccagaatctgggctactacctgagcggcacaacagccgatgccggcaacagcatcttcaccaacaccgccagcttcagccctgctcaaggtgttggagtgcagctgacccggaacggcacaatcatccccgccaacaataccgtgtctctgggcgctgttggcaccagcgctgtttctctgggactgaccgccaattacgccagaacaggcggacaagtgaccgccggcaatgtgcagtctatcatcggcgtgaccttcgtgtaccagcctggcgacggaaatgccgacgtgaccatcaccgtgaacggaaaggtggtggccaagtgatgatgaggactagtccctgttcccagagcccacttttttttctttttttgaaataaaatagcctgtctttcagatctaaaaaaaaaaaaaaaaaaaaaaaaaaaaaaaaaaaaaaaaaaaaaaaaaaaaaaaaaaaaaaaaaaaaaaaaaaaaaaaaaaaaaaaaaaaaaaaaaaaa

SEQ ID NO: 1203 - RNA, 1211 nt, synthetic construct
  misc_feature 1..1211: note Artificial____HsIgE(1-18)_Ec(J96)-FimH(22-300)_Linker-G4SGG _Ec(J96)-FimG(24-37) mRNA opt3
  source 1..1211: mol_type = other RNA
aggagagtcccgcagtcggcgtccagcggctctgcttgttcgtgtgtgtgtcgttgcaggccttattcaagcttaccatggactggacctggatcctgtttctggtggccgctgccacaagagtgcacagctttgcctgcaagaccgccaacggcaccgccattcctattggcggaggatccgccaatgtgtatgtgaatctggcccctgtggtcaacgtgggccagaacctggtggtggatctgagcacccagatcttttgccacaacgactaccccgagacaatcaccgactacgtgaccctgcagagaggctctgcttacggcggcgtgctgagcaatttttccggcaccgtgaagtacagcggcagcagctacccatttcctaccaccagcgagacacccagagtggtgtacaacagcagaaccgacaagccctggcctgtggctctgtacctgacacctgttagctctgctggcggcgtggccattaaggccggatctctgattgccgtgctgatcctgcggcagaccaacaactacaacagcgacgacttccagttcgtgtggaacatctacgccaacaacgacgtggtggtgcctacaggcggctgtgatgtgtctgccagagatgtgaccgtgacactgcctgactaccctggcagcgtgccaattcctctgaccgtgtactgtgccaagagccagaatctgggctactacctgagcggcacaacagccgatgccggcaacagcatcttcaccaacaccgccagcttcagccctgctcaaggtgttggagtgcagctgacccggaacggcacaatcatccccgccaacaataccgtgtctctgggcgctgttggcaccagcgctgtttctctgggactgaccgccaattacgccagaacaggcggacaagtgaccgccggcaatgtgcagtctatcatcggcgtgaccttcgtgtaccaaggcggaggcggatctggcggagccgatgtgacaatcacagtgaacggaaaggtggtggccaagtgatgatgaggactagtccctgttcccagagcccacttttttttctttttttgaaataaaatagcctgtctttcagatctaaaaaaaaaaaaaaaaaaaaaaaaaaaaaaaaaaaaaaaaaaaaaaaaaaaaaaaaaaaaaaaaaaaaaaaaaaaaaaaaaaaaaaaaaaaaaaaaaaaa

SEQ ID NO: 1204 - RNA, 1211 nt, synthetic construct
  misc_feature 1..1211: note Artificial____MmIgK(1-20)_Ec(J96)-FimH(22-300)_Linker-PGDGN _Ec(J96)-FimG(24-37) mRNA opt3
  source 1..1211: mol_type = other RNA
aggagagtcccgcagtcggcgtccagcggctctgcttgttcgtgtgtgtgtcgttgcaggccttattcaagcttaccatggaaaccgacacactgctgctgtgggtgctgcttctttgggtgcccggctctacaggctttgcctgcaagacagccaacggcaccgccattcctatcggcggaggatccgccaatgtgtatgtgaatctggcccctgtggtcaacgtgggccagaacctggtggtggatctgagcacccagatcttttgccacaacgactaccccgagacaatcaccgactacgtgaccctgcagagaggctctgcttacggcggcgtgctgagcaatttttccggcaccgtgaagtacagcggcagcagctacccatttcctaccaccagcgagacacccagagtggtgtacaacagcagaaccgacaagccctggcctgtggctctgtacctgacacctgttagctctgctggcggcgtggccattaaggccggatctctgattgccgtgctgatcctgcggcagaccaacaactacaacagcgacgacttccagttcgtgtggaacatctacgccaacaacgacgtggtggtgcctacaggcggctgtgatgtgtctgccagagatgtgaccgtgacactgcctgactaccctggcagcgtgccaattcctctgaccgtgtactgtgccaagagccagaatctgggctactacctgagcggcacaacagccgatgccggcaacagcatcttcaccaacaccgccagcttcagccctgctcaaggtgttggagtgcagctgacccggaacggcacaatcatccccgccaacaataccgtgtctctgggcgctgttggcaccagcgctgtttctctgggactgaccgccaactacgccagaacaggcggacaagtgacagccggcaatgtgcagtctatcatcggcgtgaccttcgtgtaccagcctggcgacggaaatgccgacgtgaccatcaccgtgaacggaaaggtggtggccaagtgatgatgaggactagtccctgttcccagagcccacttttttttctttttttgaaataaaatagcctgtctttcagatctaaaaaaaaaaaaaaaaaaaaaaaaaaaaaaaaaaaaaaaaaaaaaaaaaaaaaaaaaaaaaaaaaaaaaaaaaaaaaaaaaaaaaaaaaaaaaaaaaaaa

SEQ ID NO: 1205 - RNA, 1211 nt, synthetic construct
  misc_feature 1..1211: note Artificial____MmIgK(1-20)_Ec(536)-FimH(22-300)_Linker-PGDGN _Ec(J96)-FimG(24-37) mRNA opt3
  source 1..1211: mol_type = other RNA
aggagagtcccgcagtcggcgtccagcggctctgcttgttcgtgtgtgtgtcgttgcaggccttattcaagcttaccatggaaaccgacacactgctgctgtgggtgctgcttctttgggtgcccggctctacaggctttgcctgcaagacagccaacggcaccgccattcctatcggcggaggatccgccaatgtgtatgtgaatctggcccctgccgtgaacgtgggccagaatctggtggtggatctgagcacccagatcttttgccacaacgactaccccgagacaatcaccgactacgtgaccctgcagagaggctctgcttacggcggagtgctgagcagctttagcggcaccgtgaagtacaacggcagcagctacccatttcctaccaccagcgagacacccagagtggtgtacaacagcagaaccgacaagccctggcctgtggctctgtacctgacacctgttagctctgctggcggcgtggccattaaggccggatctctgattgccgtgctgatcctgcggcagaccaacaactacaacagcgacgacttccagttcgtgtggaacatctacgccaacaacgacgtggtggtgcctacaggcggctgtgatgtgtctgccagagatgtgaccgtgacactgcctgactaccctggcagcgtgccaattcctctgaccgtgtactgtgccaagagccagaacctgggctactacctgtctggcacaacagccgatgccggcaacagcatcttcaccaacacagccagcttcagccccgctcaaggtgttggagtgcagctgaccagaaacggcacaatcatccccgccaacaataccgtgtctctgggcgctgttggcaccagcgctgtttctctgggactgaccgccaactacgccagaacaggcggacaagtgacagccggcaatgtgcagtctatcatcggcgtgaccttcgtgtaccagcctggcgacggaaatgccgacgtgaccatcaccgtgaacggaaaggtggtggccaagtgatgatgaggactagtccctgttcccagagcccacttttttttctttttttgaaataaaatagcctgtctttcagatctaaaaaaaaaaaaaaaaaaaaaaaaaaaaaaaaaaaaaaaaaaaaaaaaaaaaaaaaaaaaaaaaaaaaaaaaaaaaaaaaaaaaaaaaaaaaaaaaaaaa

SEQ ID NO: 1206 - RNA, 1235 nt, synthetic construct
  misc_feature 1..1235: note Artificial____HsIgE(1-18)_Ec(J96)-FimH(22-300)_Linker-(G4S) 3_Ec(J96)-FimC(135-148) mRNA opt3
  source 1..1235: mol_type = other RNA
aggagagtcccgcagtcggcgtccagcggctctgcttgttcgtgtgtgtgtcgttgcaggccttattcaagcttaccatggactggacctggatcctgtttctggtggccgctgccacaagagtgcacagctttgcctgcaagaccgccaacggcaccgccattcctattggcggaggatccgccaatgtgtatgtgaatctggcccctgtggtcaacgtgggccagaacctggtggtggatctgagcacccagatcttttgccacaacgactaccccgagacaatcaccgactacgtgaccctgcagagaggctctgcttacggcggcgtgctgagcaatttttccggcaccgtgaagtacagcggcagcagctacccatttcctaccaccagcgagacacccagagtggtgtacaacagcagaaccgacaagccctggcctgtggctctgtacctgacacctgttagctctgctggcggcgtggccattaaggccggatctctgattgccgtgctgatcctgcggcagaccaacaactacaacagcgacgacttccagttcgtgtggaacatctacgccaacaacgacgtggtggtgcctacaggcggctgtgatgtgtctgccagagatgtgaccgtgacactgcctgactaccctggcagcgtgccaattcctctgaccgtgtactgtgccaagagccagaatctgggctactacctgagcggcacaacagccgatgccggcaacagcatcttcaccaacaccgccagcttcagccctgctcaaggtgttggagtgcagctgacccggaacggcacaatcatccccgccaacaataccgtgtctctgggcgctgttggcaccagcgctgtttctctgggactgaccgccaattacgccagaacaggcggacaagtgaccgccggcaatgtgcagtctatcatcggcgtgaccttcgtgtaccaaggcggaggcggatctggtggcggaggcagtggtggcggtggatctacagagaatactctgcagctggccatcatcagccggatcaagtgatgatgaggactagtccctgttcccagagcccacttttttttctttttttgaaataaaatagcctgtctttcagatctaaaaaaaaaaaaaaaaaaaaaaaaaaaaaaaaaaaaaaaaaaaaaaaaaaaaaaaaaaaaaaaaaaaaaaaaaaaaaaaaaaaaaaaaaaaaaaaaaaaa

SEQ ID NO: 1207 - RNA, 1658 nt, synthetic construct
  misc_feature 1..1658: note Artificial____LumSynth(1-154_C37A_N102D)_Linker(GGS)4-GGG_E c(J96)-FimH(22-300)_Linker-PGDGN_Ec(J96)-FimG(24-37) mRNA opt3
  source 1..1658: mol_type = other RNA
aggagagtcccgcagtcggcgtccagcggctctgcttgttcgtgtgtgtgtcgttgcaggccttattcaagcttaccatgcagatctacgagggcaagctgaccgccgagggcctgagatttggaatcgtggccagccggttcaatcacgccctggtggatagactggtggaaggcgccatcgatgccattgtcagacacggcggcagagaagaggacatcaccctcgttagagtgcccggctcttgggagattcctgtggctgctggcgagctggcccggaaagaagatatcgacgccgttatcgccatcggcgtgctgatcagaggcgccacacctcacttcgactatatcgccagcgaggtgtccaaaggcctggccgatctgagcctggaactgagaaagcccatcaccttcggcgtgatcaccgctgacacactggaacaggccattgagagagccggcaccaagcacggcaacaaaggatgggaagccgctctgtccgccatcgagatggccaacctgttcaagagcctgagaggcggctctggtggttctggcggatcaggtggaagtggcggaggatttgcctgcaagaccgccaacggaaccgccattcctatcggaggcggaagcgccaatgtgtatgtgaatctggcccctgtggtcaacgtgggccagaacctggtggtggatctgagcacccagatcttttgccacaacgactaccccgagacaatcaccgactacgtgaccctgcagagaggctctgcttacggcggagtgctgagcaatttcagcggcaccgtgaagtacagcggcagcagctacccatttcctaccaccagcgagacacccagagtggtgtacaacagcagaaccgacaagccctggcctgtggctctgtacctgacacctgttagctctgctggcggcgtggcaatcaaagccggatctctgatcgctgtgctgatcctgcggcagaccaacaactacaacagcgacgacttccagttcgtgtggaacatctacgccaacaacgacgtggtggtgcctacaggcggctgtgatgtgtctgccagagatgtgaccgtgacactgcctgactaccctggcagcgtgccaattcctctgaccgtgtactgtgccaagagccagaatctgggctactacctgagcggcacaacagccgatgccggcaacagcatcttcaccaacaccgccagcttcagccctgctcaaggtgttggagtgcagctgacccggaacggcacaatcatccccgccaacaataccgtgtctctgggcgctgttggcaccagcgctgtttctctgggactgaccgccaattacgccagaacaggcggacaagtgacagccggcaatgtgcagagcatcatcggagtgaccttcgtgtaccagcctggcgacggaaatgccgacgtgaccatcaccgtgaacggaaaggtggtggccaagtgatgatgaggactagtccctgttcccagagcccacttttttttctttttttgaaataaaatagcctgtctttcagatctaaaaaaaaaaaaaaaaaaaaaaaaaaaaaaaaaaaaaaaaaaaaaaaaaaaaaaaaaaaaaaaaaaaaaaaaaaaaaaaaaaaaaaaaaaaaaaaaaaaa

SEQ ID NO: 1208 - RNA, 1676 nt, synthetic construct
  misc_feature 1..1676: note Artificial____HsIgE(1-18)_Ec(J96)-FimH(22-300)_Linker-PGDGN _Ec(J96)-FimG(24-37)_Linker-SGG_LumSynth(1-154_C37A_N102D) mRNA opt3
  source 1..1676: mol_type = other RNA
aggagagtcccgcagtcggcgtccagcggctctgcttgttcgtgtgtgtgtcgttgcaggccttattcaagcttaccatggactggacctggatcctgtttctggtggccgctgccacaagagtgcacagctttgcctgcaagaccgccaacggcaccgccattcctattggcggaggatccgccaatgtgtatgtgaatctggcccctgtggtcaacgtgggccagaacctggtggtggatctgagcacccagatcttttgccacaacgactaccccgagacaatcaccgactacgtgaccctgcagagaggctctgcttacggcggcgtgctgagcaatttttccggcaccgtgaagtacagcggcagcagctacccatttcctaccaccagcgagacacccagagtggtgtacaacagcagaaccgacaagccctggcctgtggctctgtacctgacacctgttagctctgctggcggcgtggccattaaggccggatctctgattgccgtgctgatcctgcggcagaccaacaactacaacagcgacgacttccagttcgtgtggaacatctacgccaacaacgacgtggtggtgcctacaggcggctgtgatgtgtctgccagagatgtgaccgtgacactgcctgactaccctggcagcgtgccaattcctctgaccgtgtactgtgccaagagccagaatctgggctactacctgagcggcacaacagccgatgccggcaacagcatcttcaccaacaccgccagcttcagccctgctcaaggtgttggagtgcagctgacccggaacggcacaatcatccccgccaacaataccgtgtctctgggcgctgttggcaccagcgctgtttctctgggactgaccgccaattacgccagaacaggcggacaagtgaccgccggcaatgtgcagtctatcatcggcgtgaccttcgtgtaccagcctggcgacggaaatgccgacgtgaccatcaccgtgaacggaaaggtggtggccaagtctggcggcatgcagatctatgagggcaagctgacagccgagggcctgagatttggaatcgtggccagccggttcaatcacgccctggtggatagactggtggaaggcgccatcgatgccattgtcagacacggcggcagagaagaggacatcaccctcgttagagtgcccggctcttgggagattcctgtggctgctggcgaactggcccggaaagaggatatcgacgccgttatcgccatcggagtgctgatcagaggcgccacacctcacttcgactatatcgccagcgaggtgtccaaaggcctggccgatctgagcctggaactgagaaagcccatcaccttcggcgtgatcaccgctgacacactggaacaggccattgagagagccggcaccaagcacggaaacaaaggatgggaagccgctctgtccgccatcgagatggccaacctgttcaagagcctgcggtgatgatgaggactagtccctgttcccagagcccacttttttttctttttttgaaataaaatagcctgtctttcagatctaaaaaaaaaaaaaaaaaaaaaaaaaaaaaaaaaaaaaaaaaaaaaaaaaaaaaaaaaaaaaaaaaaaaaaaaaaaaaaaaaaaaaaaaaaaaaaaaaaaa

SEQ ID NO: 1209 - RNA, 1703 nt, synthetic construct
  misc_feature 1..1703: note Artificial____HsIgE(1-18)_Ec(J96)-FimH(22-300)_Linker-PGDGN _Ec(J96)-FimG(24-37)_Linker-SGG_Ferritin(5-167_N19Q) mRNA opt3
  source 1..1703: mol_type = other RNA
aggagagtcccgcagtcggcgtccagcggctctgcttgttcgtgtgtgtgtcgttgcaggccttattcaagcttaccatggactggacctggatcctgtttctggtggccgctgccacaagagtgcacagctttgcctgcaagaccgccaacggcaccgccattcctattggcggaggatccgccaatgtgtatgtgaatctggcccctgtggtcaacgtgggccagaacctggtggtggatctgagcacccagatcttttgccacaacgactaccccgagacaatcaccgactacgtgaccctgcagagaggctctgcttacggcggcgtgctgagcaatttttccggcaccgtgaagtacagcggcagcagctacccatttcctaccaccagcgagacacccagagtggtgtacaacagcagaaccgacaagccctggcctgtggctctgtacctgacacctgttagctctgctggcggcgtggccattaaggccggatctctgattgccgtgctgatcctgcggcagaccaacaactacaacagcgacgacttccagttcgtgtggaacatctacgccaacaacgacgtggtggtgcctacaggcggctgtgatgtgtctgccagagatgtgaccgtgacactgcctgactaccctggcagcgtgccaattcctctgaccgtgtactgtgccaagagccagaatctgggctactacctgagcggcacaacagccgatgccggcaacagcatcttcaccaacaccgccagcttcagccctgctcaaggtgttggagtgcagctgacccggaacggcacaatcatccccgccaacaataccgtgtctctgggcgctgttggcaccagcgctgtttctctgggactgaccgccaattacgccagaacaggcggacaagtgaccgccggcaatgtgcagtctatcatcggcgtgaccttcgtgtaccagcctggcgacggaaatgccgacgtgaccatcaccgtgaacggaaaggtggtggccaagtctggcggcgacatcatcaagctgctgaacgagcaagtgaacaaagagatgcagagcagcaacctgtacatgagcatgagcagctggtgctacacccacagccttgatggcgccggactgttcctgtttgaccatgccgccgaggaatacgagcacgccaagaagctgatcatcttcctgaacgagaacaacgtgcccgtccagctgaccagcatttctgcccctgagcacaagttcgagggcctgacacagatcttccagaaggcctacgaacacgagcagcacatcagcgagagcatcaacaacatcgtggaccacgccattaagagcaaggatcacgccaccttcaactttctgcagtggtacgtggccgaacagcacgaggaagaggtgctgttcaaggacatcctggacaagatcgagctgatcggcaacgagaaccacggcctgtatctggccgaccagtacgtgaagggaatcgccaagtccagaaagagctgatgatgaggactagtccctgttcccagagcccacttttttttctttttttgaaataaaatagcctgtctttcagatctaaaaaaaaaaaaaaaaaaaaaaaaaaaaaaaaaaaaaaaaaaaaaaaaaaaaaaaaaaaaaaaaaaaaaaaaaaaaaaaaaaaaaaaaaaaaaaaaaaaa

SEQ ID NO: 1210 - RNA, 1733 nt, synthetic construct
  misc_feature 1..1733: note Artificial____MmIgK(1-20)_Ec(J96)-FimH(22-300)_Linker-PGDGN _Ec(J96)-FimG(24-37)_Linker-(GGS)4_Ferritin(5-166) mRNA opt3
  source 1..1733: mol_type = other RNA
aggagagtcccgcagtcggcgtccagcggctctgcttgttcgtgtgtgtgtcgttgcaggccttattcaagcttaccatggaaaccgacacactgctgctgtgggtgctgcttctttgggtgcccggctctacaggctttgcctgcaagacagccaacggcaccgccattcctatcggcggaggatccgccaatgtgtatgtgaatctggcccctgtggtcaacgtgggccagaacctggtggtggatctgagcacccagatcttttgccacaacgactaccccgagacaatcaccgactacgtgaccctgcagagaggctctgcttacggcggcgtgctgagcaatttttccggcaccgtgaagtacagcggcagcagctacccatttcctaccaccagcgagacacccagagtggtgtacaacagcagaaccgacaagccctggcctgtggctctgtacctgacacctgttagctctgctggcggcgtggccattaaggccggatctctgattgccgtgctgatcctgcggcagaccaacaactacaacagcgacgacttccagttcgtgtggaacatctacgccaacaacgacgtggtggtgcctacaggcggctgtgatgtgtctgccagagatgtgaccgtgacactgcctgactaccctggcagcgtgccaattcctctgaccgtgtactgtgccaagagccagaatctgggctactacctgagcggcacaacagccgatgccggcaacagcatcttcaccaacaccgccagcttcagccctgctcaaggtgttggagtgcagctgacccggaacggcacaatcatccccgccaacaataccgtgtctctgggcgctgttggcaccagcgctgtttctctgggactgaccgccaactacgccagaacaggcggacaagtgacagccggcaatgtgcagtctatcatcggcgtgaccttcgtgtaccagcctggcgacggaaatgccgacgtgaccatcaccgtgaacggaaaggtggtggccaaaggcggttctggtggttctggcggaagtggcggcagcgacatcatcaagctgctgaacgagcaagtgaacaaagagatgaacagcagcaacctgtacatgagcatgagcagctggtgctacacacacagcctggatggcgccggactgttcctgtttgatcatgccgccgaggaatacgagcacgccaagaagctgatcatcttcctgaacgagaacaacgtgcccgtccagctgaccagcatttctgcccctgagcacaagttcgagggcctgacacagatcttccagaaggcctacgaacacgagcagcacatcagcgagagcatcaacaacatcgtggaccacgccatcaagagcaaggatcacgccaccttcaactttctgcagtggtacgtggccgaacagcacgaggaagaggtgctgttcaaggacatcctggacaagatcgagctgatcggcaacgagaaccacggcctgtatctggccgaccagtacgtgaagggaatcgccaagtccagaaagtgatgatgaggactagtccctgttcccagagcccacttttttttctttttttgaaataaaatagcctgtctttcagatctaaaaaaaaaaaaaaaaaaaaaaaaaaaaaaaaaaaaaaaaaaaaaaaaaaaaaaaaaaaaaaaaaaaaaaaaaaaaaaaaaaaaaaaaaaaaaaaaaaaa

SEQ ID NO: 1211 - RNA, 1376 nt, synthetic construct
  misc_feature 1..1376: note Artificial____HsIgE(1-18)_Ec(J96)-FimH(22-300)_Linker-PGDGN _Ec(J96)-FimG(24-37)_TMdomain-HA(510-566) mRNA opt3
  source 1..1376: mol_type = other RNA
aggagagtcccgcagtcggcgtccagcggctctgcttgttcgtgtgtgtgtcgttgcaggccttattcaagcttaccatggactggacctggatcctgtttctggtggccgctgccacaagagtgcacagctttgcctgcaagaccgccaacggcaccgccattcctattggcggaggatccgccaatgtgtatgtgaatctggcccctgtggtcaacgtgggccagaacctggtggtggatctgagcacccagatcttttgccacaacgactaccccgagacaatcaccgactacgtgaccctgcagagaggctctgcttacggcggcgtgctgagcaatttttccggcaccgtgaagtacagcggcagcagctacccatttcctaccaccagcgagacacccagagtggtgtacaacagcagaaccgacaagccctggcctgtggctctgtacctgacacctgttagctctgctggcggcgtggccattaaggccggatctctgattgccgtgctgatcctgcggcagaccaacaactacaacagcgacgacttccagttcgtgtggaacatctacgccaacaacgacgtggtggtgcctacaggcggctgtgatgtgtctgccagagatgtgaccgtgacactgcctgactaccctggcagcgtgccaattcctctgaccgtgtactgtgccaagagccagaatctgggctactacctgagcggcacaacagccgatgccggcaacagcatcttcaccaacaccgccagcttcagccctgctcaaggtgttggagtgcagctgacccggaacggcacaatcatccccgccaacaataccgtgtctctgggcgctgttggcaccagcgctgtttctctgggactgaccgccaattacgccagaacaggcggacaagtgaccgccggcaatgtgcagtctatcatcggcgtgaccttcgtgtaccagcctggcgacggaaatgccgacgtgaccatcaccgtgaacggaaaggtggtggccaaggccaagctgaaccgggaagagatcgatggcgtgaagctggaaagcacccggatctaccagatcctggccatctacagcacagtggcctctagcctggtgctggtggtgtccctgggagccatcagcttttggatgtgcagcaacggcagcctgcagtgccggatctgtatctgatgatgaggactagtccctgttcccagagcccacttttttttctttttttgaaataaaatagcctgtctttcagatctaaaaaaaaaaaaaaaaaaaaaaaaaaaaaaaaaaaaaaaaaaaaaaaaaaaaaaaaaaaaaaaaaaaaaaaaaaaaaaaaaaaaaaaaaaaaaaaaaaaa

SEQ ID NO: 1212 - RNA, 1709 nt, synthetic construct
  misc_feature 1..1709: note Artificial____HsIgE(1-18)_LumSynth(1-154_C37A_N102D)_Linker (GGS)4-GGG_Ec(J96)-FimH(22-300)_Linker-PGDGN_Ec(J96)-FimG(2 4-37) mRNA opt3
  source 1..1709: mol_type = other RNA
aggagagtcccgcagtcggcgtccagcggctctgcttgttcgtgtgtgtgtcgttgcaggccttattcaagcttaccatggactggacctggatcctgtttctggtggccgctgccacaagagtgcacagccagatctatgagggcaagctgaccgccgagggcctgagatttggaatcgtggccagccggttcaatcacgccctggtggatagactggtggaaggcgccatcgatgccattgtcagacacggcggcagagaagaggacatcaccctcgttagagtgcccggctcttgggagattcctgtggctgctggcgagctggcccggaaagaagatatcgacgccgttatcgccatcggcgtgctgatcagaggcgccacacctcacttcgactatatcgccagcgaggtgtccaaaggcctggccgatctgagcctggaactgagaaagcccatcaccttcggcgtgatcaccgctgacacactggaacaggccattgagagagccggcaccaagcacggcaacaaaggatgggaagccgctctgtccgccatcgagatggccaacctgttcaagagcctgagaggcggctctggtggttctggcggatcaggtggaagtggcggaggatttgcctgcaagaccgccaacggaaccgccattcctatcggaggcggaagcgccaatgtgtatgtgaatctggcccctgtggtcaacgtgggccagaacctggtggtggatctgagcacccagatcttttgccacaacgactaccccgagacaatcaccgactacgtgaccctgcagagaggctctgcttacggcggagtgctgagcaatttcagcggcaccgtgaagtacagcggcagcagctacccatttcctaccaccagcgagacacccagagtggtgtacaacagcagaaccgacaagccctggcctgtggctctgtacctgacacctgttagctctgctggcggcgtggcaatcaaagccggatctctgatcgctgtgctgatcctgcggcagaccaacaactacaacagcgacgacttccagttcgtgtggaacatctacgccaacaacgacgtggtggtgcctacaggcggctgtgatgtgtctgccagagatgtgaccgtgacactgcctgactaccctggcagcgtgccaattcctctgaccgtgtactgtgccaagagccagaatctgggctactacctgagcggcacaacagccgatgccggcaacagcatcttcaccaacaccgccagcttcagccctgctcaaggtgttggagtgcagctgacccggaacggcacaatcatccccgccaacaataccgtgtctctgggcgctgttggcaccagcgctgtttctctgggactgaccgccaattacgccagaacaggcggacaagtgacagccggcaatgtgcagagcatcatcggagtgaccttcgtgtaccagcctggcgacggaaatgccgacgtgaccatcaccgtgaacggaaaggtggtggccaagtgatgatgaggactagtccctgttcccagagcccacttttttttctttttttgaaataaaatagcctgtctttcagatctaaaaaaaaaaaaaaaaaaaaaaaaaaaaaaaaaaaaaaaaaaaaaaaaaaaaaaaaaaaaaaaaaaaaaaaaaaaaaaaaaaaaaaaaaaaaaaaaaaaa

SEQ ID NO: 1213 - RNA, 1676 nt, synthetic construct
  misc_feature 1..1676: note Artificial____HsIgE(1-18)_Ec(J96)-FimH(22-300_N28S_N91S_N24 9Q)_Linker-PGDGN_Ec(J96)-FimG(24-37)_Linker-SGG_LumSynth(1- 154_C37A_N102D) mRNA opt3
  source 1..1676: mol_type = other RNA
aggagagtcccgcagtcggcgtccagcggctctgcttgttcgtgtgtgtgtcgttgcaggccttattcaagcttaccatggactggacctggatcctgtttctggtggccgctgccacaagagtgcacagctttgcctgtaaaaccgccagcggcaccgccattcctatcggcggaggatctgccaatgtgtatgtgaatctggcccctgtggtcaacgtgggccagaacctggtggtggatctgagcacccagatcttttgccacaacgactaccccgagacaatcaccgactacgtgaccctgcagagaggctctgcttacggcggagtgctgagcagcttttccggcaccgtgaagtacagcggcagcagctacccatttcctaccaccagcgagacacccagagtggtgtacaacagcagaaccgacaagccctggcctgtggctctgtacctgacacctgttagctctgctggcggcgtggccattaaggccggatctctgattgccgtgctgatcctgcggcagaccaacaactacaacagcgacgacttccagttcgtgtggaacatctacgccaacaacgacgtggtggtgcctacaggcggctgtgatgtgtctgccagagatgtgaccgtgacactgcctgactaccctggcagcgtgccaattcctctgaccgtgtactgtgccaagagccagaatctgggctactacctgagcggcacaacagccgatgccggcaacagcatcttcaccaacaccgccagcttcagccctgctcaaggtgttggagtgcagctgaccagacagggcacaatcatccccgccaacaataccgtgtctctgggcgctgttggcaccagcgctgtttctctgggactgaccgccaactacgccagaacaggcggacaagtgacagccggcaatgtgcagtctatcatcggcgtgaccttcgtgtaccagcctggcgacggaaatgccgacgtgaccatcaccgtgaacggaaaggtggtggccaagtctggcggcatgcagatctatgagggcaagctgaccgccgagggcctgagatttggaatcgtggccagccggttcaatcacgccctggtggatagactggtggaaggcgccatcgatgccattgtcagacacggcggcagagaagaggacatcaccctcgttagagtgcccggctcttgggagattcctgtggctgctggcgaactggcccggaaagaggatatcgacgccgttatcgccatcggggtgctgatcagaggcgccacacctcacttcgactatatcgccagcgaggtgtccaaaggcctggccgatctgagcctggaactgagaaagcccatcaccttcggcgtgatcaccgctgacacactggaacaggccattgagagagccggcaccaagcacggaaacaaaggatgggaagccgctctgtccgccatcgagatggccaacctgttcaagagcctgcggtgatgatgaggactagtccctgttcccagagcccacttttttttctttttttgaaataaaatagcctgtctttcagatctaaaaaaaaaaaaaaaaaaaaaaaaaaaaaaaaaaaaaaaaaaaaaaaaaaaaaaaaaaaaaaaaaaaaaaaaaaaaaaaaaaaaaaaaaaaaaaaaaaaa

SEQ ID NO: 1214 - RNA, 1676 nt, synthetic construct
  misc_feature 1..1676: note Artificial____HsIgE(1-18)_Ec(J96)-FimH(22-300_N28S_N91S_N24 9Q_N256D)_Linker-PGDGN_Ec(J96)-FimG(24-37)_Linker-SGG_LumSy nth(1-154_C37A_N102D) mRNA opt3
  source 1..1676: mol_type = other RNA
aggagagtcccgcagtcggcgtccagcggctctgcttgttcgtgtgtgtgtcgttgcaggccttattcaagcttaccatggactggacctggatcctgtttctggtggccgctgccacaagagtgcacagctttgcctgtaaaaccgccagcggcaccgccattcctatcggcggaggatctgccaatgtgtatgtgaatctggcccctgtggtcaacgtgggccagaacctggtggtggatctgagcacccagatcttttgccacaacgactaccccgagacaatcaccgactacgtgaccctgcagagaggctctgcttacggcggagtgctgagcagcttttccggcaccgtgaagtacagcggcagcagctacccatttcctaccaccagcgagacacccagagtggtgtacaacagcagaaccgacaagccctggcctgtggctctgtacctgacacctgttagctctgctggcggcgtggccattaaggccggatctctgattgccgtgctgatcctgcggcagaccaacaactacaacagcgacgacttccagttcgtgtggaacatctacgccaacaacgacgtggtggtgcctacaggcggctgtgatgtgtctgccagagatgtgaccgtgacactgcctgactaccctggcagcgtgccaattcctctgaccgtgtactgtgccaagagccagaatctgggctactacctgagcggcacaacagccgatgccggcaacagcatcttcaccaacaccgccagcttcagccctgctcaaggtgttggagtgcagctgaccagacagggcacaatcatccccgccgacaacacagtgtctctgggagctgttggcaccagcgccgtttctctgggactgacagccaactacgccagaacaggcggacaagtgacagccggcaatgtgcagtctatcatcggcgtgaccttcgtgtaccagcctggcgacggaaatgccgacgtgaccatcaccgtgaacggaaaggtggtggccaagtctggcggcatgcagatctatgagggcaagctgaccgccgagggcctgagatttggaatcgtggccagccggttcaatcacgccctggtggatagactggtggaaggcgccatcgatgccattgtcagacacggcggcagagaagaggacatcaccctcgttagagtgcccggctcttgggagattcctgtggctgctggcgaactggcccggaaagaggatatcgacgccgttatcgccatcggggtgctgatcagaggcgccacacctcacttcgactatatcgccagcgaggtgtccaaaggcctggccgatctgagcctggaactgagaaagcccatcaccttcggcgtgatcaccgctgacacactggaacaggccattgagagagccggcaccaagcacggaaacaaaggatgggaagccgctctgtccgccatcgagatggccaacctgttcaagagcctgcggtgatgatgaggactagtccctgttcccagagcccacttttttttctttttttgaaataaaatagcctgtctttcagatctaaaaaaaaaaaaaaaaaaaaaaaaaaaaaaaaaaaaaaaaaaaaaaaaaaaaaaaaaaaaaaaaaaaaaaaaaaaaaaaaaaaaaaaaaaaaaaaaaaaa

SEQ ID NO: 1215 - RNA, 1676 nt, synthetic construct
  misc_feature 1..1676: note Artificial____HsIgE(1-18)_Ec(J96)-FimH(22-300_N28S_V48C_L55 C_N91S_N249Q)_Linker-PGDGN_Ec(J96)-FimG(24-37)_Linker-SGG_L umSynth(1-154_C37A_N102D) mRNA opt3
  source 1..1676: mol_type = other RNA
aggagagtcccgcagtcggcgtccagcggctctgcttgttcgtgtgtgtgtcgttgcaggccttattcaagcttaccatggactggacctggatcctgtttctggtggccgctgccacaagagtgcacagctttgcctgtaaaaccgccagcggcaccgccattcctatcggcggaggatctgccaatgtgtatgtgaatctggccccttgcgtgaacgtgggccagaactgtgtggtggacctgagcacccagatcttttgccacaacgactaccccgagacaatcaccgactacgtgaccctgcagagaggctctgcttacggcggagtgctgagcagcttttccggcaccgtgaagtacagcggcagcagctacccatttcctaccaccagcgagacacccagagtggtgtacaacagcagaaccgacaagccctggcctgtggctctgtacctgacacctgttagctctgctggcggcgtggccattaaggccggatctctgattgccgtgctgatcctgcggcagaccaacaactacaacagcgacgacttccagttcgtgtggaacatctacgccaacaacgacgtggtggtgcctacaggcggctgtgatgtgtctgccagagatgtgaccgtgacactgcctgactaccctggcagcgtgccaattcctctgaccgtgtactgtgccaagagccagaacctgggctactacctgtctggcacaacagccgatgccggcaacagcatcttcaccaacaccgccagcttcagccctgctcaaggtgttggagtgcagctgaccagacagggcacaatcatccccgccaacaataccgtgtctctgggcgctgttggcaccagcgctgtttctctgggactgaccgccaactacgccagaacaggcggacaagtgacagccggcaatgtgcagtctatcatcggcgtgaccttcgtgtaccagcctggcgacggaaatgccgacgtgaccatcaccgtgaacggaaaggtggtggccaagtctggcggcatgcagatctatgagggcaagctgaccgccgagggcctgagatttggaatcgtggccagccggttcaatcacgccctggtggatagactggtggaaggcgccatcgatgccattgtcagacacggcggcagagaagaggacatcaccctcgttagagtgcccggctcttgggagattcctgtggctgctggcgaactggcccggaaagaggatatcgacgccgttatcgccatcggggtgctgatcagaggcgccacacctcacttcgactatatcgccagcgaggtgtccaaaggcctggccgatctgagcctggaactgagaaagcccatcaccttcggcgtgatcaccgctgacacactggaacaggccattgagagagccggcaccaagcacggaaacaaaggatgggaagccgctctgtccgccatcgagatggccaacctgttcaagagcctgcggtgatgatgaggactagtccctgttcccagagcccacttttttttctttttttgaaataaaatagcctgtctttcagatctaaaaaaaaaaaaaaaaaaaaaaaaaaaaaaaaaaaaaaaaaaaaaaaaaaaaaaaaaaaaaaaaaaaaaaaaaaaaaaaaaaaaaaaaaaaaaaaaaaaa

SEQ ID NO: 1216 - RNA, 1676 nt, synthetic construct
  misc_feature 1..1676: note Artificial____HsIgE(1-18)_Ec(J96)-FimH(22-300_F165V)_Linker -PGDGN_Ec(J96)-FimG(24-37)_Linker-SGG_LumSynth(1-154_C37A_N 102D) mRNA opt3
  source 1..1676: mol_type = other RNA
aggagagtcccgcagtcggcgtccagcggctctgcttgttcgtgtgtgtgtcgttgcaggccttattcaagcttaccatggactggacctggatcctgtttctggtggccgctgccacaagagtgcacagctttgcctgcaagaccgccaacggcaccgccattcctattggcggaggatccgccaatgtgtatgtgaatctggcccctgtggtcaacgtgggccagaacctggtggtggatctgagcacccagatcttttgccacaacgactaccccgagacaatcaccgactacgtgaccctgcagagaggctctgcttacggcggcgtgctgagcaatttttccggcaccgtgaagtacagcggcagcagctacccatttcctaccaccagcgagacacccagagtggtgtacaacagcagaaccgacaagccctggcctgtggctctgtacctgacacctgttagctctgctggcggcgtggccattaaggccggatctctgattgccgtgctgatcctgcggcagaccaacaactacaacagcgacgacttccaggtcgtgtggaacatctacgccaacaacgacgtggtggtgcctacaggcggctgtgatgtgtctgccagagatgtgaccgtgacactgcctgactaccctggcagcgtgccaattcctctgaccgtgtactgtgccaagagccagaatctgggctactacctgagcggcacaacagccgatgccggcaacagcatcttcaccaacaccgccagcttcagccctgctcaaggtgttggagtgcagctgacccggaacggcacaatcatccccgccaacaataccgtgtctctgggcgctgttggcaccagcgctgtttctctgggactgaccgccaattacgccagaacaggcggacaagtgaccgccggcaatgtgcagtctatcatcggcgtgaccttcgtgtaccagcctggcgacggaaatgccgacgtgaccatcaccgtgaacggaaaggtggtggccaagtctggcggcatgcagatctatgagggcaagctgacagccgagggcctgagatttggaatcgtggccagccggttcaatcacgccctggtggatagactggtggaaggcgccatcgatgccattgtcagacacggcggcagagaagaggacatcaccctcgttagagtgcccggctcttgggagattcctgtggctgctggcgaactggcccggaaagaggatatcgacgccgttatcgccatcggagtgctgatcagaggcgccacacctcacttcgactatatcgccagcgaggtgtccaaaggcctggccgatctgagcctggaactgagaaagcccatcaccttcggcgtgatcaccgctgacacactggaacaggccattgagagagccggcaccaagcacggaaacaaaggatgggaagccgctctgtccgccatcgagatggccaacctgttcaagagcctgcggtgatgatgaggactagtccctgttcccagagcccacttttttttctttttttgaaataaaatagcctgtctttcagatctaaaaaaaaaaaaaaaaaaaaaaaaaaaaaaaaaaaaaaaaaaaaaaaaaaaaaaaaaaaaaaaaaaaaaaaaaaaaaaaaaaaaaaaaaaaaaaaaaaaa

SEQ ID NO: 1217 - RNA, 1703 nt, synthetic construct
  misc_feature 1..1703: note Artificial____HsIgE(1-18)_Ec(J96)-FimH(22-300_N28S_N91S_N24 9Q)_Linker-PGDGN_Ec(J96)-FimG(24-37)_Linker-SGG_Ferritin(5- 167_N19Q) mRNA opt3
  source 1..1703: mol_type = other RNA
aggagagtcccgcagtcggcgtccagcggctctgcttgttcgtgtgtgtgtcgttgcaggccttattcaagcttaccatggactggacctggatcctgtttctggtggccgctgccacaagagtgcacagctttgcctgtaaaaccgccagcggcaccgccattcctatcggcggaggatctgccaatgtgtatgtgaatctggcccctgtggtcaacgtgggccagaacctggtggtggatctgagcacccagatcttttgccacaacgactaccccgagacaatcaccgactacgtgaccctgcagagaggctctgcttacggcggagtgctgagcagcttttccggcaccgtgaagtacagcggcagcagctacccatttcctaccaccagcgagacacccagagtggtgtacaacagcagaaccgacaagccctggcctgtggctctgtacctgacacctgttagctctgctggcggcgtggccattaaggccggatctctgattgccgtgctgatcctgcggcagaccaacaactacaacagcgacgacttccagttcgtgtggaacatctacgccaacaacgacgtggtggtgcctacaggcggctgtgatgtgtctgccagagatgtgaccgtgacactgcctgactaccctggcagcgtgccaattcctctgaccgtgtactgtgccaagagccagaatctgggctactacctgagcggcacaacagccgatgccggcaacagcatcttcaccaacaccgccagcttcagccctgctcaaggtgttggagtgcagctgaccagacagggcacaatcatccccgccaacaataccgtgtctctgggcgctgttggcaccagcgctgtttctctgggactgaccgccaactacgccagaacaggcggacaagtgacagccggcaatgtgcagtctatcatcggcgtgaccttcgtgtaccagcctggcgacggaaatgccgacgtgaccatcaccgtgaacggaaaggtggtggccaagtctggcggcgacatcatcaagctgctgaacgagcaagtgaacaaagagatgcagagcagcaacctgtacatgagcatgagcagctggtgctacacccacagccttgatggcgccggactgttcctgtttgatcacgccgccgaggaatacgagcacgccaagaagctgatcatcttcctgaacgagaacaacgtgcccgtccagctgacctctatctctgcccctgagcacaagttcgagggcctgacacagatcttccagaaggcctacgaacacgagcagcacatcagcgagagcatcaacaacatcgtggaccacgccattaagagcaaggatcacgccaccttcaactttctgcagtggtacgtggccgaacagcacgaggaagaggtgctgttcaaggacatcctggacaagatcgagctgatcggcaacgagaaccacggcctgtatctggccgaccagtacgtgaagggaatcgccaagtccagaaagagctgatgatgaggactagtccctgttcccagagcccacttttttttctttttttgaaataaaatagcctgtctttcagatctaaaaaaaaaaaaaaaaaaaaaaaaaaaaaaaaaaaaaaaaaaaaaaaaaaaaaaaaaaaaaaaaaaaaaaaaaaaaaaaaaaaaaaaaaaaaaaaaaaaa

SEQ ID NO: 1218 - RNA, 1703 nt, synthetic construct
  misc_feature 1..1703: note Artificial____HsIgE(1-18)_Ec(J96)-FimH(22-300_N28S_N91S_N24 9Q_N256D)_Linker-PGDGN_Ec(J96)-FimG(24-37)_Linker-SGG_Ferri tin(5-167_N19Q) mRNA opt3
  source 1..1703: mol_type = other RNA
aggagagtcccgcagtcggcgtccagcggctctgcttgttcgtgtgtgtgtcgttgcaggccttattcaagcttaccatggactggacctggatcctgtttctggtggccgctgccacaagagtgcacagctttgcctgtaaaaccgccagcggcaccgccattcctatcggcggaggatctgccaatgtgtatgtgaatctggcccctgtggtcaacgtgggccagaacctggtggtggatctgagcacccagatcttttgccacaacgactaccccgagacaatcaccgactacgtgaccctgcagagaggctctgcttacggcggagtgctgagcagcttttccggcaccgtgaagtacagcggcagcagctacccatttcctaccaccagcgagacacccagagtggtgtacaacagcagaaccgacaagccctggcctgtggctctgtacctgacacctgttagctctgctggcggcgtggccattaaggccggatctctgattgccgtgctgatcctgcggcagaccaacaactacaacagcgacgacttccagttcgtgtggaacatctacgccaacaacgacgtggtggtgcctacaggcggctgtgatgtgtctgccagagatgtgaccgtgacactgcctgactaccctggcagcgtgccaattcctctgaccgtgtactgtgccaagagccagaatctgggctactacctgagcggcacaacagccgatgccggcaacagcatcttcaccaacaccgccagcttcagccctgctcaaggtgttggagtgcagctgaccagacagggcacaatcatccccgccgacaacacagtgtctctgggagctgttggcaccagcgccgtttctctgggactgacagccaactacgccagaacaggcggacaagtgacagccggcaatgtgcagtctatcatcggcgtgaccttcgtgtaccagcctggcgacggaaatgccgacgtgaccatcaccgtgaacggaaaggtggtggccaagtctggcggcgacatcatcaagctgctgaacgagcaagtgaacaaagagatgcagagcagcaacctgtacatgagcatgagcagctggtgctacacccacagccttgatggcgccggactgttcctgtttgatcacgccgccgaggaatacgagcacgccaagaagctgatcatcttcctgaacgagaacaacgtgcccgtccagctgacctctatctctgcccctgagcacaagttcgagggcctgacacagatcttccagaaggcctacgaacacgagcagcacatcagcgagagcatcaacaacatcgtggaccacgccattaagagcaaggatcacgccaccttcaactttctgcagtggtacgtggccgaacagcacgaggaagaggtgctgttcaaggacatcctggacaagatcgagctgatcggcaacgagaaccacggcctgtatctggccgaccagtacgtgaagggaatcgccaagtccagaaagagctgatgatgaggactagtccctgttcccagagcccacttttttttctttttttgaaataaaatagcctgtctttcagatctaaaaaaaaaaaaaaaaaaaaaaaaaaaaaaaaaaaaaaaaaaaaaaaaaaaaaaaaaaaaaaaaaaaaaaaaaaaaaaaaaaaaaaaaaaaaaaaaaaaa

SEQ ID NO: 1219 - RNA, 1703 nt, synthetic construct
  misc_feature 1..1703: note Artificial____HsIgE(1-18)_Ec(J96)-FimH(22-300_N28S_V48C_L55 C_N91S_N249Q)_Linker-PGDGN_Ec(J96)-FimG(24-37)_Linker-SGG_F erritin(5-167_N19Q) mRNA opt3
  source 1..1703: mol_type = other RNA
aggagagtcccgcagtcggcgtccagcggctctgcttgttcgtgtgtgtgtcgttgcaggccttattcaagcttaccatggactggacctggatcctgtttctggtggccgctgccacaagagtgcacagctttgcctgtaaaaccgccagcggcaccgccattcctatcggcggaggatctgccaatgtgtatgtgaatctggccccttgcgtgaacgtgggccagaactgtgtggtggacctgagcacccagatcttttgccacaacgactaccccgagacaatcaccgactacgtgaccctgcagagaggctctgcttacggcggagtgctgagcagcttttccggcaccgtgaagtacagcggcagcagctacccatttcctaccaccagcgagacacccagagtggtgtacaacagcagaaccgacaagccctggcctgtggctctgtacctgacacctgttagctctgctggcggcgtggccattaaggccggatctctgattgccgtgctgatcctgcggcagaccaacaactacaacagcgacgacttccagttcgtgtggaacatctacgccaacaacgacgtggtggtgcctacaggcggctgtgatgtgtctgccagagatgtgaccgtgacactgcctgactaccctggcagcgtgccaattcctctgaccgtgtactgtgccaagagccagaacctgggctactacctgtctggcacaacagccgatgccggcaacagcatcttcaccaacaccgccagcttcagccctgctcaaggtgttggagtgcagctgaccagacagggcacaatcatccccgccaacaataccgtgtctctgggcgctgttggcaccagcgctgtttctctgggactgaccgccaactacgccagaacaggcggacaagtgacagccggcaatgtgcagtctatcatcggcgtgaccttcgtgtaccagcctggcgacggaaatgccgacgtgaccatcaccgtgaacggaaaggtggtggccaagtctggcggcgacatcatcaagctgctgaacgagcaagtgaacaaagagatgcagagcagcaacctgtacatgagcatgagcagctggtgctacacccacagccttgatggcgccggactgttcctgtttgatcacgccgccgaggaatacgagcacgccaagaagctgatcatcttcctgaacgagaacaacgtgcccgtccagctgacctctatctctgcccctgagcacaagttcgagggcctgacacagatcttccagaaggcctacgaacacgagcagcacatcagcgagagcatcaacaacatcgtggaccacgccattaagagcaaggatcacgccaccttcaactttctgcagtggtacgtggccgaacagcacgaggaagaggtgctgttcaaggacatcctggacaagatcgagctgatcggcaacgagaaccacggcctgtatctggccgaccagtacgtgaagggaatcgccaagtccagaaagagctgatgatgaggactagtccctgttcccagagcccacttttttttctttttttgaaataaaatagcctgtctttcagatctaaaaaaaaaaaaaaaaaaaaaaaaaaaaaaaaaaaaaaaaaaaaaaaaaaaaaaaaaaaaaaaaaaaaaaaaaaaaaaaaaaaaaaaaaaaaaaaaaaaa

SEQ ID NO: 1220 - RNA, 1703 nt, synthetic construct
  misc_feature 1..1703: note Artificial____HsIgE(1-18)_Ec(J96)-FimH(22-300_F165V)_Linker -PGDGN_Ec(J96)-FimG(24-37)_Linker-SGG_Ferritin(5-167_N19Q) mRNA opt3
  source 1..1703: mol_type = other RNA
aggagagtcccgcagtcggcgtccagcggctctgcttgttcgtgtgtgtgtcgttgcaggccttattcaagcttaccatggactggacctggatcctgtttctggtggccgctgccacaagagtgcacagctttgcctgcaagaccgccaacggcaccgccattcctattggcggaggatccgccaatgtgtatgtgaatctggcccctgtggtcaacgtgggccagaacctggtggtggatctgagcacccagatcttttgccacaacgactaccccgagacaatcaccgactacgtgaccctgcagagaggctctgcttacggcggcgtgctgagcaatttttccggcaccgtgaagtacagcggcagcagctacccatttcctaccaccagcgagacacccagagtggtgtacaacagcagaaccgacaagccctggcctgtggctctgtacctgacacctgttagctctgctggcggcgtggccattaaggccggatctctgattgccgtgctgatcctgcggcagaccaacaactacaacagcgacgacttccaggtcgtgtggaacatctacgccaacaacgacgtggtggtgcctacaggcggctgtgatgtgtctgccagagatgtgaccgtgacactgcctgactaccctggcagcgtgccaattcctctgaccgtgtactgtgccaagagccagaatctgggctactacctgagcggcacaacagccgatgccggcaacagcatcttcaccaacaccgccagcttcagccctgctcaaggtgttggagtgcagctgacccggaacggcacaatcatccccgccaacaataccgtgtctctgggcgctgttggcaccagcgctgtttctctgggactgaccgccaattacgccagaacaggcggacaagtgaccgccggcaatgtgcagtctatcatcggcgtgaccttcgtgtaccagcctggcgacggaaatgccgacgtgaccatcaccgtgaacggaaaggtggtggccaagtctggcggcgacatcatcaagctgctgaacgagcaagtgaacaaagagatgcagagcagcaacctgtacatgagcatgagcagctggtgctacacccacagccttgatggcgccggactgttcctgtttgaccatgccgccgaggaatacgagcacgccaagaagctgatcatcttcctgaacgagaacaacgtgcccgtccagctgaccagcatttctgcccctgagcacaagttcgagggcctgacacagatcttccagaaggcctacgaacacgagcagcacatcagcgagagcatcaacaacatcgtggaccacgccattaagagcaaggatcacgccaccttcaactttctgcagtggtacgtggccgaacagcacgaggaagaggtgctgttcaaggacatcctggacaagatcgagctgatcggcaacgagaaccacggcctgtatctggccgaccagtacgtgaagggaatcgccaagtccagaaagagctgatgatgaggactagtccctgttcccagagcccacttttttttctttttttgaaataaaatagcctgtctttcagatctaaaaaaaaaaaaaaaaaaaaaaaaaaaaaaaaaaaaaaaaaaaaaaaaaaaaaaaaaaaaaaaaaaaaaaaaaaaaaaaaaaaaaaaaaaaaaaaaaaaa

SEQ ID NO: 1221 - RNA, 980 nt, synthetic construct
  misc_feature 1..980: note Artificial____Ec(J96)-FimC(1-36)_Ec(J96)-FimC(37-241) mRNA opt4
  source 1..980: mol_type = other RNA
aggagagtcccgcagtcggcgtccagcggctctgcttgttcgtgtgtgtgtcgttgcaggccttattcaagcttaccatgagcaacaagaacgtgaacgtgagaaagagccaggagatcaccttctgcctgctggccggcatcctgatgttcatggccatgatggtggccggcagagccgaggccggcgtggccctgggcgccaccagagtgatctaccccgccggccagaagcaggtgcagctggccgtgaccaacaacgacgagaacagcacctacctgatccagagctgggtggagaacgccgacggcgtgaaggacggcagattcatcgtgaccccccccctgttcgccatgaagggcaagaaggagaacaccctgagaatcctggacgccaccaacaaccagctgccccaggacagagagagcctgttctggatgaacgtgaaggccatccccagcatggacaagagcaagctgaccgagaacaccctgcagctggccatcatcagcagaatcaagctgtactacagacccgccaagctggccctgccccccgaccaggccgccgagaagctgagattcagaagaagcgccaacagcctgaccctgatcaaccccaccccctactacctgaccgtgaccgagctgaacgccggcaccagagtgctggagaacgccctggtgccccccatgggcgagagcaccgtgaagctgcccagcgacgccggcagcaacatcacctacagaaccatcaacgactacggcgccctgacccccaagatgaccggcgtgatggagtgatgatgaggactagtccctgttcccagagcccacttttttttctttttttgaaataaaatagcctgtctttcagatctaaaaaaaaaaaaaaaaaaaaaaaaaaaaaaaaaaaaaaaaaaaaaaaaaaaaaaaaaaaaaaaaaaaaaaaaaaaaaaaaaaaaaaaaaaaaaaaaaaaa

SEQ ID NO: 1222 - RNA, 926 nt, synthetic construct
  misc_feature 1..926: note = Artificial____HsIgE(1-18)_Ec(J96)-FimC(37-241) mRNA opt4
  source 1..926: mol_type = other RNA
aggagagtcccgcagtcggcgtccagcggctctgcttgttcgtgtgtgtgtcgttgcaggccttattcaagcttaccatggactggacctggatcctgttcctggtggccgccgccaccagagtgcacagcggcgtggccctgggcgccaccagagtgatctaccccgccggccagaagcaggtgcagctggccgtgaccaacaacgacgagaacagcacctacctgatccagagctgggtggagaacgccgacggcgtgaaggacggcagattcatcgtgaccccccccctgttcgccatgaagggcaagaaggagaacaccctgagaatcctggacgccaccaacaaccagctgccccaggacagagagagcctgttctggatgaacgtgaaggccatccccagcatggacaagagcaagctgaccgagaacaccctgcagctggccatcatcagcagaatcaagctgtactacagacccgccaagctggccctgccccccgaccaggccgccgagaagctgagattcagaagaagcgccaacagcctgaccctgatcaaccccaccccctactacctgaccgtgaccgagctgaacgccggcaccagagtgctggagaacgccctggtgccccccatgggcgagagcaccgtgaagctgcccagcgacgccggcagcaacatcacctacagaaccatcaacgactacggcgccctgacccccaagatgaccggcgtgatggagtgatgatgaggactagtccctgttcccagagcccacttttttttctttttttgaaataaaatagcctgtctttcagatctaaaaaaaaaaaaaaaaaaaaaaaaaaaaaaaaaaaaaaaaaaaaaaaaaaaaaaaaaaaaaaaaaaaaaaaaaaaaaaaaaaaaaaaaaaaaaaaaaaaa

SEQ ID NO: 1223 - RNA, 1157 nt, synthetic construct
  misc_feature 1..1157: note Artificial____Ec(J96)-FimH(1-21)_Ec(J96)-FimH(22-300) mRNA opt4
  source 1..1157: mol_type = other RNA
aggagagtcccgcagtcggcgtccagcggctctgcttgttcgtgtgtgtgtcgttgcaggccttattcaagcttaccatgaagagagtgatcaccctgttcgccgtgctgctgatgggctggagcgtgaacgcctggagcttcgcctgcaagaccgccaacggcaccgccatccccatcggcggcggcagcgccaacgtgtacgtgaacctggcccccgtggtgaacgtgggccagaacctggtggtggacctgagcacccagatcttctgccacaacgactaccccgagaccatcaccgactacgtgaccctgcagagaggcagcgcctacggcggcgtgctgagcaacttcagcggcaccgtgaagtacagcggcagcagctaccccttccccaccaccagcgagacccccagagtggtgtacaacagcagaaccgacaagccctggcccgtggccctgtacctgacccccgtgagcagcgccggcggcgtggccatcaaggccggcagcctgatcgccgtgctgatcctgagacagaccaacaactacaacagcgacgacttccagttcgtgtggaacatctacgccaacaacgacgtggtggtgcccaccggcggctgcgacgtgagcgccagagacgtgaccgtgaccctgcccgactaccccggcagcgtgcccatccccctgaccgtgtactgcgccaagagccagaacctgggctactacctgagcggcaccaccgccgacgccggcaacagcatcttcaccaacaccgccagcttcagccccgcccagggcgtgggcgtgcagctgaccagaaacggcaccatcatccccgccaacaacaccgtgagcctgggcgccgtgggcaccagcgccgtgagcctgggcctgaccgccaactacgccagaaccggcggccaggtgaccgccggcaacgtgcagagcatcatcggcgtgaccttcgtgtaccagtgatgatgaggactagtccctgttcccagagcccacttttttttctttttttgaaataaaatagcctgtctttcagatctaaaaaaaaaaaaaaaaaaaaaaaaaaaaaaaaaaaaaaaaaaaaaaaaaaaaaaaaaaaaaaaaaaaaaaaaaaaaaaaaaaaaaaaaaaaaaaaaaaaa

SEQ ID NO: 1224 - RNA, 1148 nt, synthetic construct
  misc_feature 1..1148: note = Artificial____HsIgE(1-18)_Ec(J96)-FimH(22-300) mRNA opt4
  source 1..1148: mol_type = other RNA
aggagagtcccgcagtcggcgtccagcggctctgcttgttcgtgtgtgtgtcgttgcaggccttattcaagcttaccatggactggacctggatcctgttcctggtggccgccgccaccagagtgcacagcttcgcctgcaagaccgccaacggcaccgccatccccatcggcggcggcagcgccaacgtgtacgtgaacctggcccccgtggtgaacgtgggccagaacctggtggtggacctgagcacccagatcttctgccacaacgactaccccgagaccatcaccgactacgtgaccctgcagagaggcagcgcctacggcggcgtgctgagcaacttcagcggcaccgtgaagtacagcggcagcagctaccccttccccaccaccagcgagacccccagagtggtgtacaacagcagaaccgacaagccctggcccgtggccctgtacctgacccccgtgagcagcgccggcggcgtggccatcaaggccggcagcctgatcgccgtgctgatcctgagacagaccaacaactacaacagcgacgacttccagttcgtgtggaacatctacgccaacaacgacgtggtggtgcccaccggcggctgcgacgtgagcgccagagacgtgaccgtgaccctgcccgactaccccggcagcgtgcccatccccctgaccgtgtactgcgccaagagccagaacctgggctactacctgagcggcaccaccgccgacgccggcaacagcatcttcaccaacaccgccagcttcagccccgcccagggcgtgggcgtgcagctgaccagaaacggcaccatcatccccgccaacaacaccgtgagcctgggcgccgtgggcaccagcgccgtgagcctgggcctgaccgccaactacgccagaaccggcggccaggtgaccgccggcaacgtgcagagcatcatcggcgtgaccttcgtgtaccagtgatgatgaggactagtccctgttcccagagcccacttttttttctttttttgaaataaaatagcctgtctttcagatctaaaaaaaaaaaaaaaaaaaaaaaaaaaaaaaaaaaaaaaaaaaaaaaaaaaaaaaaaaaaaaaaaaaaaaaaaaaaaaaaaaaaaaaaaaaaaaaaaaaa

SEQ ID NO: 1225 - RNA, 1154 nt, synthetic construct
  misc_feature 1..1154: note = Artificial____MmIgK(1-20)_Ec(J96)-FimH(22-300) mRNA opt4
  source 1..1154: mol_type = other RNA
aggagagtcccgcagtcggcgtccagcggctctgcttgttcgtgtgtgtgtcgttgcaggccttattcaagcttaccatggagaccgacaccctgctgctgtgggtgctgctgctgtgggtgcccggcagcaccggcttcgcctgcaagaccgccaacggcaccgccatccccatcggcggcggcagcgccaacgtgtacgtgaacctggcccccgtggtgaacgtgggccagaacctggtggtggacctgagcacccagatcttctgccacaacgactaccccgagaccatcaccgactacgtgaccctgcagagaggcagcgcctacggcggcgtgctgagcaacttcagcggcaccgtgaagtacagcggcagcagctaccccttccccaccaccagcgagacccccagagtggtgtacaacagcagaaccgacaagccctggcccgtggccctgtacctgacccccgtgagcagcgccggcggcgtggccatcaaggccggcagcctgatcgccgtgctgatcctgagacagaccaacaactacaacagcgacgacttccagttcgtgtggaacatctacgccaacaacgacgtggtggtgcccaccggcggctgcgacgtgagcgccagagacgtgaccgtgaccctgcccgactaccccggcagcgtgcccatccccctgaccgtgtactgcgccaagagccagaacctgggctactacctgagcggcaccaccgccgacgccggcaacagcatcttcaccaacaccgccagcttcagccccgcccagggcgtgggcgtgcagctgaccagaaacggcaccatcatccccgccaacaacaccgtgagcctgggcgccgtgggcaccagcgccgtgagcctgggcctgaccgccaactacgccagaaccggcggccaggtgaccgccggcaacgtgcagagcatcatcggcgtgaccttcgtgtaccagtgatgatgaggactagtccctgttcccagagcccacttttttttctttttttgaaataaaatagcctgtctttcagatctaaaaaaaaaaaaaaaaaaaaaaaaaaaaaaaaaaaaaaaaaaaaaaaaaaaaaaaaaaaaaaaaaaaaaaaaaaaaaaaaaaaaaaaaaaaaaaaaaaaa

SEQ ID NO: 1226 - RNA, 1214 nt, synthetic construct
  misc_feature 1..1214: note Artificial____Ec(J96)-FimH(1-21)_Ec(J96)-FimH(22-300)_Linke r-PGDGN_Ec(J96)-FimG(24-37) mRNA opt4
  source 1..1214: mol_type = other RNA
aggagagtcccgcagtcggcgtccagcggctctgcttgttcgtgtgtgtgtcgttgcaggccttattcaagcttaccatgaagagagtgatcaccctgttcgccgtgctgctgatgggctggagcgtgaacgcctggagcttcgcctgcaagaccgccaacggcaccgccatccccatcggcggcggcagcgccaacgtgtacgtgaacctggcccccgtggtgaacgtgggccagaacctggtggtggacctgagcacccagatcttctgccacaacgactaccccgagaccatcaccgactacgtgaccctgcagagaggcagcgcctacggcggcgtgctgagcaacttcagcggcaccgtgaagtacagcggcagcagctaccccttccccaccaccagcgagacccccagagtggtgtacaacagcagaaccgacaagccctggcccgtggccctgtacctgacccccgtgagcagcgccggcggcgtggccatcaaggccggcagcctgatcgccgtgctgatcctgagacagaccaacaactacaacagcgacgacttccagttcgtgtggaacatctacgccaacaacgacgtggtggtgcccaccggcggctgcgacgtgagcgccagagacgtgaccgtgaccctgcccgactaccccggcagcgtgcccatccccctgaccgtgtactgcgccaagagccagaacctgggctactacctgagcggcaccaccgccgacgccggcaacagcatcttcaccaacaccgccagcttcagccccgcccagggcgtgggcgtgcagctgaccagaaacggcaccatcatccccgccaacaacaccgtgagcctgggcgccgtgggcaccagcgccgtgagcctgggcctgaccgccaactacgccagaaccggcggccaggtgaccgccggcaacgtgcagagcatcatcggcgtgaccttcgtgtaccagcccggcgacggcaacgccgacgtgaccatcaccgtgaacggcaaggtggtggccaagtgatgatgaggactagtccctgttcccagagcccacttttttttctttttttgaaataaaatagcctgtctttcagatctaaaaaaaaaaaaaaaaaaaaaaaaaaaaaaaaaaaaaaaaaaaaaaaaaaaaaaaaaaaaaaaaaaaaaaaaaaaaaaaaaaaaaaaaaaaaaaaaaaaa

SEQ ID NO: 1227 - RNA, 1205 nt, synthetic construct
  misc_feature 1..1205: note Artificial____HsIgE(1-18)_Ec(J96)-FimH(22-300)_Linker-PGDGN _Ec(J96)-FimG(24-37) mRNA opt4
  source 1..1205: mol_type = other RNA
aggagagtcccgcagtcggcgtccagcggctctgcttgttcgtgtgtgtgtcgttgcaggccttattcaagcttaccatggactggacctggatcctgttcctggtggccgccgccaccagagtgcacagcttcgcctgcaagaccgccaacggcaccgccatccccatcggcggcggcagcgccaacgtgtacgtgaacctggcccccgtggtgaacgtgggccagaacctggtggtggacctgagcacccagatcttctgccacaacgactaccccgagaccatcaccgactacgtgaccctgcagagaggcagcgcctacggcggcgtgctgagcaacttcagcggcaccgtgaagtacagcggcagcagctaccccttccccaccaccagcgagacccccagagtggtgtacaacagcagaaccgacaagccctggcccgtggccctgtacctgacccccgtgagcagcgccggcggcgtggccatcaaggccggcagcctgatcgccgtgctgatcctgagacagaccaacaactacaacagcgacgacttccagttcgtgtggaacatctacgccaacaacgacgtggtggtgcccaccggcggctgcgacgtgagcgccagagacgtgaccgtgaccctgcccgactaccccggcagcgtgcccatccccctgaccgtgtactgcgccaagagccagaacctgggctactacctgagcggcaccaccgccgacgccggcaacagcatcttcaccaacaccgccagcttcagccccgcccagggcgtgggcgtgcagctgaccagaaacggcaccatcatccccgccaacaacaccgtgagcctgggcgccgtgggcaccagcgccgtgagcctgggcctgaccgccaactacgccagaaccggcggccaggtgaccgccggcaacgtgcagagcatcatcggcgtgaccttcgtgtaccagcccggcgacggcaacgccgacgtgaccatcaccgtgaacggcaaggtggtggccaagtgatgatgaggactagtccctgttcccagagcccacttttttttctttttttgaaataaaatagcctgtctttcagatctaaaaaaaaaaaaaaaaaaaaaaaaaaaaaaaaaaaaaaaaaaaaaaaaaaaaaaaaaaaaaaaaaaaaaaaaaaaaaaaaaaaaaaaaaaaaaaaaaaaa

SEQ ID NO: 1228 - RNA, 1211 nt, synthetic construct
  misc_feature 1..1211: note Artificial____HsIgE(1-18)_Ec(J96)-FimH(22-300)_Linker-G4SGG _Ec(J96)-FimG(24-37) mRNA opt4
  source 1..1211: mol_type = other RNA
aggagagtcccgcagtcggcgtccagcggctctgcttgttcgtgtgtgtgtcgttgcaggccttattcaagcttaccatggactggacctggatcctgttcctggtggccgccgccaccagagtgcacagcttcgcctgcaagaccgccaacggcaccgccatccccatcggcggcggcagcgccaacgtgtacgtgaacctggcccccgtggtgaacgtgggccagaacctggtggtggacctgagcacccagatcttctgccacaacgactaccccgagaccatcaccgactacgtgaccctgcagagaggcagcgcctacggcggcgtgctgagcaacttcagcggcaccgtgaagtacagcggcagcagctaccccttccccaccaccagcgagacccccagagtggtgtacaacagcagaaccgacaagccctggcccgtggccctgtacctgacccccgtgagcagcgccggcggcgtggccatcaaggccggcagcctgatcgccgtgctgatcctgagacagaccaacaactacaacagcgacgacttccagttcgtgtggaacatctacgccaacaacgacgtggtggtgcccaccggcggctgcgacgtgagcgccagagacgtgaccgtgaccctgcccgactaccccggcagcgtgcccatccccctgaccgtgtactgcgccaagagccagaacctgggctactacctgagcggcaccaccgccgacgccggcaacagcatcttcaccaacaccgccagcttcagccccgcccagggcgtgggcgtgcagctgaccagaaacggcaccatcatccccgccaacaacaccgtgagcctgggcgccgtgggcaccagcgccgtgagcctgggcctgaccgccaactacgccagaaccggcggccaggtgaccgccggcaacgtgcagagcatcatcggcgtgaccttcgtgtaccagggcggcggcggcagcggcggcgccgacgtgaccatcaccgtgaacggcaaggtggtggccaagtgatgatgaggactagtccctgttcccagagcccacttttttttctttttttgaaataaaatagcctgtctttcagatctaaaaaaaaaaaaaaaaaaaaaaaaaaaaaaaaaaaaaaaaaaaaaaaaaaaaaaaaaaaaaaaaaaaaaaaaaaaaaaaaaaaaaaaaaaaaaaaaaaaa

SEQ ID NO: 1229 - RNA, 1211 nt, synthetic construct
  misc_feature 1..1211: note Artificial____MmIgK(1-20)_Ec(J96)-FimH(22-300)_Linker-PGDGN _Ec(J96)-FimG(24-37) mRNA opt4
  source 1..1211: mol_type = other RNA
aggagagtcccgcagtcggcgtccagcggctctgcttgttcgtgtgtgtgtcgttgcaggccttattcaagcttaccatggagaccgacaccctgctgctgtgggtgctgctgctgtgggtgcccggcagcaccggcttcgcctgcaagaccgccaacggcaccgccatccccatcggcggcggcagcgccaacgtgtacgtgaacctggcccccgtggtgaacgtgggccagaacctggtggtggacctgagcacccagatcttctgccacaacgactaccccgagaccatcaccgactacgtgaccctgcagagaggcagcgcctacggcggcgtgctgagcaacttcagcggcaccgtgaagtacagcggcagcagctaccccttccccaccaccagcgagacccccagagtggtgtacaacagcagaaccgacaagccctggcccgtggccctgtacctgacccccgtgagcagcgccggcggcgtggccatcaaggccggcagcctgatcgccgtgctgatcctgagacagaccaacaactacaacagcgacgacttccagttcgtgtggaacatctacgccaacaacgacgtggtggtgcccaccggcggctgcgacgtgagcgccagagacgtgaccgtgaccctgcccgactaccccggcagcgtgcccatccccctgaccgtgtactgcgccaagagccagaacctgggctactacctgagcggcaccaccgccgacgccggcaacagcatcttcaccaacaccgccagcttcagccccgcccagggcgtgggcgtgcagctgaccagaaacggcaccatcatccccgccaacaacaccgtgagcctgggcgccgtgggcaccagcgccgtgagcctgggcctgaccgccaactacgccagaaccggcggccaggtgaccgccggcaacgtgcagagcatcatcggcgtgaccttcgtgtaccagcccggcgacggcaacgccgacgtgaccatcaccgtgaacggcaaggtggtggccaagtgatgatgaggactagtccctgttcccagagcccacttttttttctttttttgaaataaaatagcctgtctttcagatctaaaaaaaaaaaaaaaaaaaaaaaaaaaaaaaaaaaaaaaaaaaaaaaaaaaaaaaaaaaaaaaaaaaaaaaaaaaaaaaaaaaaaaaaaaaaaaaaaaaa

SEQ ID NO: 1230 - RNA, 1211 nt, synthetic construct
  misc_feature 1..1211: note Artificial____MmIgK(1-20)_Ec(536)-FimH(22-300)_Linker-PGDGN _Ec(J96)-FimG(24-37) mRNA opt4
  source 1..1211: mol_type = other RNA
aggagagtcccgcagtcggcgtccagcggctctgcttgttcgtgtgtgtgtcgttgcaggccttattcaagcttaccatggagaccgacaccctgctgctgtgggtgctgctgctgtgggtgcccggcagcaccggcttcgcctgcaagaccgccaacggcaccgccatccccatcggcggcggcagcgccaacgtgtacgtgaacctggcccccgccgtgaacgtgggccagaacctggtggtggacctgagcacccagatcttctgccacaacgactaccccgagaccatcaccgactacgtgaccctgcagagaggcagcgcctacggcggcgtgctgagcagcttcagcggcaccgtgaagtacaacggcagcagctaccccttccccaccaccagcgagacccccagagtggtgtacaacagcagaaccgacaagccctggcccgtggccctgtacctgacccccgtgagcagcgccggcggcgtggccatcaaggccggcagcctgatcgccgtgctgatcctgagacagaccaacaactacaacagcgacgacttccagttcgtgtggaacatctacgccaacaacgacgtggtggtgcccaccggcggctgcgacgtgagcgccagagacgtgaccgtgaccctgcccgactaccccggcagcgtgcccatccccctgaccgtgtactgcgccaagagccagaacctgggctactacctgagcggcaccaccgccgacgccggcaacagcatcttcaccaacaccgccagcttcagccccgcccagggcgtgggcgtgcagctgaccagaaacggcaccatcatccccgccaacaacaccgtgagcctgggcgccgtgggcaccagcgccgtgagcctgggcctgaccgccaactacgccagaaccggcggccaggtgaccgccggcaacgtgcagagcatcatcggcgtgaccttcgtgtaccagcccggcgacggcaacgccgacgtgaccatcaccgtgaacggcaaggtggtggccaagtgatgatgaggactagtccctgttcccagagcccacttttttttctttttttgaaataaaatagcctgtctttcagatctaaaaaaaaaaaaaaaaaaaaaaaaaaaaaaaaaaaaaaaaaaaaaaaaaaaaaaaaaaaaaaaaaaaaaaaaaaaaaaaaaaaaaaaaaaaaaaaaaaaa

SEQ ID NO: 1231 - RNA, 1235 nt, synthetic construct
  misc_feature 1..1235: note Artificial____HsIgE(1-18)_Ec(J96)-FimH(22-300)_Linker-(G4S) 3_Ec(J96)-FimC(135-148) mRNA opt4
  source 1..1235: mol_type = other RNA
aggagagtcccgcagtcggcgtccagcggctctgcttgttcgtgtgtgtgtcgttgcaggccttattcaagcttaccatggactggacctggatcctgttcctggtggccgccgccaccagagtgcacagcttcgcctgcaagaccgccaacggcaccgccatccccatcggcggcggcagcgccaacgtgtacgtgaacctggcccccgtggtgaacgtgggccagaacctggtggtggacctgagcacccagatcttctgccacaacgactaccccgagaccatcaccgactacgtgaccctgcagagaggcagcgcctacggcggcgtgctgagcaacttcagcggcaccgtgaagtacagcggcagcagctaccccttccccaccaccagcgagacccccagagtggtgtacaacagcagaaccgacaagccctggcccgtggccctgtacctgacccccgtgagcagcgccggcggcgtggccatcaaggccggcagcctgatcgccgtgctgatcctgagacagaccaacaactacaacagcgacgacttccagttcgtgtggaacatctacgccaacaacgacgtggtggtgcccaccggcggctgcgacgtgagcgccagagacgtgaccgtgaccctgcccgactaccccggcagcgtgcccatccccctgaccgtgtactgcgccaagagccagaacctgggctactacctgagcggcaccaccgccgacgccggcaacagcatcttcaccaacaccgccagcttcagccccgcccagggcgtgggcgtgcagctgaccagaaacggcaccatcatccccgccaacaacaccgtgagcctgggcgccgtgggcaccagcgccgtgagcctgggcctgaccgccaactacgccagaaccggcggccaggtgaccgccggcaacgtgcagagcatcatcggcgtgaccttcgtgtaccagggcggcggcggcagcggcggcggcggcagcggcggcggcggcagcaccgagaacaccctgcagctggccatcatcagcagaatcaagtgatgatgaggactagtccctgttcccagagcccacttttttttctttttttgaaataaaatagcctgtctttcagatctaaaaaaaaaaaaaaaaaaaaaaaaaaaaaaaaaaaaaaaaaaaaaaaaaaaaaaaaaaaaaaaaaaaaaaaaaaaaaaaaaaaaaaaaaaaaaaaaaaaa

SEQ ID NO: 1232 - RNA, 1658 nt, synthetic construct
  misc_feature 1..1658: note Artificial____LumSynth(1-154_C37A_N102D)_Linker(GGS)4-GGG_E c(J96)-FimH(22-300)_Linker-PGDGN_Ec(J96)-FimG(24-37) mRNA opt4
  source 1..1658: mol_type = other RNA
aggagagtcccgcagtcggcgtccagcggctctgcttgttcgtgtgtgtgtcgttgcaggccttattcaagcttaccatgcagatctacgagggcaagctgaccgccgagggcctgagattcggcatcgtggccagcagattcaaccacgccctggtggacagactggtggagggcgccatcgacgccatcgtgagacacggcggcagagaggaggacatcaccctggtgagagtgcccggcagctgggagatccccgtggccgccggcgagctggccagaaaggaggacatcgacgccgtgatcgccatcggcgtgctgatcagaggcgccaccccccacttcgactacatcgccagcgaggtgagcaagggcctggccgacctgagcctggagctgagaaagcccatcaccttcggcgtgatcaccgccgacaccctggagcaggccatcgagagagccggcaccaagcacggcaacaagggctgggaggccgccctgagcgccatcgagatggccaacctgttcaagagcctgagaggcggcagcggcggcagcggcggcagcggcggcagcggcggcggcttcgcctgcaagaccgccaacggcaccgccatccccatcggcggcggcagcgccaacgtgtacgtgaacctggcccccgtggtgaacgtgggccagaacctggtggtggacctgagcacccagatcttctgccacaacgactaccccgagaccatcaccgactacgtgaccctgcagagaggcagcgcctacggcggcgtgctgagcaacttcagcggcaccgtgaagtacagcggcagcagctaccccttccccaccaccagcgagacccccagagtggtgtacaacagcagaaccgacaagccctggcccgtggccctgtacctgacccccgtgagcagcgccggcggcgtggccatcaaggccggcagcctgatcgccgtgctgatcctgagacagaccaacaactacaacagcgacgacttccagttcgtgtggaacatctacgccaacaacgacgtggtggtgcccaccggcggctgcgacgtgagcgccagagacgtgaccgtgaccctgcccgactaccccggcagcgtgcccatccccctgaccgtgtactgcgccaagagccagaacctgggctactacctgagcggcaccaccgccgacgccggcaacagcatcttcaccaacaccgccagcttcagccccgcccagggcgtgggcgtgcagctgaccagaaacggcaccatcatccccgccaacaacaccgtgagcctgggcgccgtgggcaccagcgccgtgagcctgggcctgaccgccaactacgccagaaccggcggccaggtgaccgccggcaacgtgcagagcatcatcggcgtgaccttcgtgtaccagcccggcgacggcaacgccgacgtgaccatcaccgtgaacggcaaggtggtggccaagtgatgatgaggactagtccctgttcccagagcccacttttttttctttttttgaaataaaatagcctgtctttcagatctaaaaaaaaaaaaaaaaaaaaaaaaaaaaaaaaaaaaaaaaaaaaaaaaaaaaaaaaaaaaaaaaaaaaaaaaaaaaaaaaaaaaaaaaaaaaaaaaaaaa

SEQ ID NO: 1233 - RNA, 1676 nt, synthetic construct
  misc_feature 1..1676: note Artificial____HsIgE(1-18)_Ec(J96)-FimH(22-300)_Linker-PGDGN _Ec(J96)-FimG(24-37)_Linker-SGG_LumSynth(1-154_C37A_N102D) mRNA opt4
  source 1..1676: mol_type = other RNA
aggagagtcccgcagtcggcgtccagcggctctgcttgttcgtgtgtgtgtcgttgcaggccttattcaagcttaccatggactggacctggatcctgttcctggtggccgccgccaccagagtgcacagcttcgcctgcaagaccgccaacggcaccgccatccccatcggcggcggcagcgccaacgtgtacgtgaacctggcccccgtggtgaacgtgggccagaacctggtggtggacctgagcacccagatcttctgccacaacgactaccccgagaccatcaccgactacgtgaccctgcagagaggcagcgcctacggcggcgtgctgagcaacttcagcggcaccgtgaagtacagcggcagcagctaccccttccccaccaccagcgagacccccagagtggtgtacaacagcagaaccgacaagccctggcccgtggccctgtacctgacccccgtgagcagcgccggcggcgtggccatcaaggccggcagcctgatcgccgtgctgatcctgagacagaccaacaactacaacagcgacgacttccagttcgtgtggaacatctacgccaacaacgacgtggtggtgcccaccggcggctgcgacgtgagcgccagagacgtgaccgtgaccctgcccgactaccccggcagcgtgcccatccccctgaccgtgtactgcgccaagagccagaacctgggctactacctgagcggcaccaccgccgacgccggcaacagcatcttcaccaacaccgccagcttcagccccgcccagggcgtgggcgtgcagctgaccagaaacggcaccatcatccccgccaacaacaccgtgagcctgggcgccgtgggcaccagcgccgtgagcctgggcctgaccgccaactacgccagaaccggcggccaggtgaccgccggcaacgtgcagagcatcatcggcgtgaccttcgtgtaccagcccggcgacggcaacgccgacgtgaccatcaccgtgaacggcaaggtggtggccaagagcggcggcatgcagatctacgagggcaagctgaccgccgagggcctgagattcggcatcgtggccagcagattcaaccacgccctggtggacagactggtggagggcgccatcgacgccatcgtgagacacggcggcagagaggaggacatcaccctggtgagagtgcccggcagctgggagatccccgtggccgccggcgagctggccagaaaggaggacatcgacgccgtgatcgccatcggcgtgctgatcagaggcgccaccccccacttcgactacatcgccagcgaggtgagcaagggcctggccgacctgagcctggagctgagaaagcccatcaccttcggcgtgatcaccgccgacaccctggagcaggccatcgagagagccggcaccaagcacggcaacaagggctgggaggccgccctgagcgccatcgagatggccaacctgttcaagagcctgagatgatgatgaggactagtccctgttcccagagcccacttttttttctttttttgaaataaaatagcctgtctttcagatctaaaaaaaaaaaaaaaaaaaaaaaaaaaaaaaaaaaaaaaaaaaaaaaaaaaaaaaaaaaaaaaaaaaaaaaaaaaaaaaaaaaaaaaaaaaaaaaaaaaa

SEQ ID NO: 1234 - RNA, 1703 nt, synthetic construct
  misc_feature 1..1703: note Artificial____HsIgE(1-18)_Ec(J96)-FimH(22-300)_Linker-PGDGN _Ec(J96)-FimG(24-37)_Linker-SGG_Ferritin(5-167_N19Q) mRNA opt4
  source 1..1703: mol_type = other RNA
aggagagtcccgcagtcggcgtccagcggctctgcttgttcgtgtgtgtgtcgttgcaggccttattcaagcttaccatggactggacctggatcctgttcctggtggccgccgccaccagagtgcacagcttcgcctgcaagaccgccaacggcaccgccatccccatcggcggcggcagcgccaacgtgtacgtgaacctggcccccgtggtgaacgtgggccagaacctggtggtggacctgagcacccagatcttctgccacaacgactaccccgagaccatcaccgactacgtgaccctgcagagaggcagcgcctacggcggcgtgctgagcaacttcagcggcaccgtgaagtacagcggcagcagctaccccttccccaccaccagcgagacccccagagtggtgtacaacagcagaaccgacaagccctggcccgtggccctgtacctgacccccgtgagcagcgccggcggcgtggccatcaaggccggcagcctgatcgccgtgctgatcctgagacagaccaacaactacaacagcgacgacttccagttcgtgtggaacatctacgccaacaacgacgtggtggtgcccaccggcggctgcgacgtgagcgccagagacgtgaccgtgaccctgcccgactaccccggcagcgtgcccatccccctgaccgtgtactgcgccaagagccagaacctgggctactacctgagcggcaccaccgccgacgccggcaacagcatcttcaccaacaccgccagcttcagccccgcccagggcgtgggcgtgcagctgaccagaaacggcaccatcatccccgccaacaacaccgtgagcctgggcgccgtgggcaccagcgccgtgagcctgggcctgaccgccaactacgccagaaccggcggccaggtgaccgccggcaacgtgcagagcatcatcggcgtgaccttcgtgtaccagcccggcgacggcaacgccgacgtgaccatcaccgtgaacggcaaggtggtggccaagagcggcggcgacatcatcaagctgctgaacgagcaggtgaacaaggagatgcagagcagcaacctgtacatgagcatgagcagctggtgctacacccacagcctggacggcgccggcctgttcctgttcgaccacgccgccgaggagtacgagcacgccaagaagctgatcatcttcctgaacgagaacaacgtgcccgtgcagctgaccagcatcagcgcccccgagcacaagttcgagggcctgacccagatcttccagaaggcctacgagcacgagcagcacatcagcgagagcatcaacaacatcgtggaccacgccatcaagagcaaggaccacgccaccttcaacttcctgcagtggtacgtggccgagcagcacgaggaggaggtgctgttcaaggacatcctggacaagatcgagctgatcggcaacgagaaccacggcctgtacctggccgaccagtacgtgaagggcatcgccaagagcagaaagagctgatgatgaggactagtccctgttcccagagcccacttttttttctttttttgaaataaaatagcctgtctttcagatctaaaaaaaaaaaaaaaaaaaaaaaaaaaaaaaaaaaaaaaaaaaaaaaaaaaaaaaaaaaaaaaaaaaaaaaaaaaaaaaaaaaaaaaaaaaaaaaaaaaa

SEQ ID NO: 1235 - RNA, 1733 nt, synthetic construct
  misc_feature 1..1733: note Artificial____MmIgK(1-20)_Ec(J96)-FimH(22-300)_Linker-PGDGN _Ec(J96)-FimG(24-37)_Linker-(GGS)4_Ferritin(5-166) mRNA opt4
  source 1..1733: mol_type = other RNA
aggagagtcccgcagtcggcgtccagcggctctgcttgttcgtgtgtgtgtcgttgcaggccttattcaagcttaccatggagaccgacaccctgctgctgtgggtgctgctgctgtgggtgcccggcagcaccggcttcgcctgcaagaccgccaacggcaccgccatccccatcggcggcggcagcgccaacgtgtacgtgaacctggcccccgtggtgaacgtgggccagaacctggtggtggacctgagcacccagatcttctgccacaacgactaccccgagaccatcaccgactacgtgaccctgcagagaggcagcgcctacggcggcgtgctgagcaacttcagcggcaccgtgaagtacagcggcagcagctaccccttccccaccaccagcgagacccccagagtggtgtacaacagcagaaccgacaagccctggcccgtggccctgtacctgacccccgtgagcagcgccggcggcgtggccatcaaggccggcagcctgatcgccgtgctgatcctgagacagaccaacaactacaacagcgacgacttccagttcgtgtggaacatctacgccaacaacgacgtggtggtgcccaccggcggctgcgacgtgagcgccagagacgtgaccgtgaccctgcccgactaccccggcagcgtgcccatccccctgaccgtgtactgcgccaagagccagaacctgggctactacctgagcggcaccaccgccgacgccggcaacagcatcttcaccaacaccgccagcttcagccccgcccagggcgtgggcgtgcagctgaccagaaacggcaccatcatccccgccaacaacaccgtgagcctgggcgccgtgggcaccagcgccgtgagcctgggcctgaccgccaactacgccagaaccggcggccaggtgaccgccggcaacgtgcagagcatcatcggcgtgaccttcgtgtaccagcccggcgacggcaacgccgacgtgaccatcaccgtgaacggcaaggtggtggccaagggcggcagcggcggcagcggcggcagcggcggcagcgacatcatcaagctgctgaacgagcaggtgaacaaggagatgaacagcagcaacctgtacatgagcatgagcagctggtgctacacccacagcctggacggcgccggcctgttcctgttcgaccacgccgccgaggagtacgagcacgccaagaagctgatcatcttcctgaacgagaacaacgtgcccgtgcagctgaccagcatcagcgcccccgagcacaagttcgagggcctgacccagatcttccagaaggcctacgagcacgagcagcacatcagcgagagcatcaacaacatcgtggaccacgccatcaagagcaaggaccacgccaccttcaacttcctgcagtggtacgtggccgagcagcacgaggaggaggtgctgttcaaggacatcctggacaagatcgagctgatcggcaacgagaaccacggcctgtacctggccgaccagtacgtgaagggcatcgccaagagcagaaagtgatgatgaggactagtccctgttcccagagcccacttttttttctttttttgaaataaaatagcctgtctttcagatctaaaaaaaaaaaaaaaaaaaaaaaaaaaaaaaaaaaaaaaaaaaaaaaaaaaaaaaaaaaaaaaaaaaaaaaaaaaaaaaaaaaaaaaaaaaaaaaaaaaa

SEQ ID NO: 1236 - RNA, 1376 nt, synthetic construct
  misc_feature 1..1376: note Artificial____HsIgE(1-18)_Ec(J96)-FimH(22-300)_Linker-PGDGN _Ec(J96)-FimG(24-37)_TMdomain-HA(510-566) mRNA opt4
  source 1..1376: mol_type = other RNA
aggagagtcccgcagtcggcgtccagcggctctgcttgttcgtgtgtgtgtcgttgcaggccttattcaagcttaccatggactggacctggatcctgttcctggtggccgccgccaccagagtgcacagcttcgcctgcaagaccgccaacggcaccgccatccccatcggcggcggcagcgccaacgtgtacgtgaacctggcccccgtggtgaacgtgggccagaacctggtggtggacctgagcacccagatcttctgccacaacgactaccccgagaccatcaccgactacgtgaccctgcagagaggcagcgcctacggcggcgtgctgagcaacttcagcggcaccgtgaagtacagcggcagcagctaccccttccccaccaccagcgagacccccagagtggtgtacaacagcagaaccgacaagccctggcccgtggccctgtacctgacccccgtgagcagcgccggcggcgtggccatcaaggccggcagcctgatcgccgtgctgatcctgagacagaccaacaactacaacagcgacgacttccagttcgtgtggaacatctacgccaacaacgacgtggtggtgcccaccggcggctgcgacgtgagcgccagagacgtgaccgtgaccctgcccgactaccccggcagcgtgcccatccccctgaccgtgtactgcgccaagagccagaacctgggctactacctgagcggcaccaccgccgacgccggcaacagcatcttcaccaacaccgccagcttcagccccgcccagggcgtgggcgtgcagctgaccagaaacggcaccatcatccccgccaacaacaccgtgagcctgggcgccgtgggcaccagcgccgtgagcctgggcctgaccgccaactacgccagaaccggcggccaggtgaccgccggcaacgtgcagagcatcatcggcgtgaccttcgtgtaccagcccggcgacggcaacgccgacgtgaccatcaccgtgaacggcaaggtggtggccaaggccaagctgaacagagaggagatcgacggcgtgaagctggagagcaccagaatctaccagatcctggccatctacagcaccgtggccagcagcctggtgctggtggtgagcctgggcgccatcagcttctggatgtgcagcaacggcagcctgcagtgcagaatctgcatctgatgatgaggactagtccctgttcccagagcccacttttttttctttttttgaaataaaatagcctgtctttcagatctaaaaaaaaaaaaaaaaaaaaaaaaaaaaaaaaaaaaaaaaaaaaaaaaaaaaaaaaaaaaaaaaaaaaaaaaaaaaaaaaaaaaaaaaaaaaaaaaaaaa

SEQ ID NO: 1237 - RNA, 1709 nt, synthetic construct
  misc_feature 1..1709: note Artificial____HsIgE(1-18)_LumSynth(1-154_C37A_N102D)_Linker (GGS)4-GGG_Ec(J96)-FimH(22-300)_Linker-PGDGN_Ec(J96)-FimG(2 4-37) mRNA opt4
  source 1..1709: mol_type = other RNA
aggagagtcccgcagtcggcgtccagcggctctgcttgttcgtgtgtgtgtcgttgcaggccttattcaagcttaccatggactggacctggatcctgttcctggtggccgccgccaccagagtgcacagccagatctacgagggcaagctgaccgccgagggcctgagattcggcatcgtggccagcagattcaaccacgccctggtggacagactggtggagggcgccatcgacgccatcgtgagacacggcggcagagaggaggacatcaccctggtgagagtgcccggcagctgggagatccccgtggccgccggcgagctggccagaaaggaggacatcgacgccgtgatcgccatcggcgtgctgatcagaggcgccaccccccacttcgactacatcgccagcgaggtgagcaagggcctggccgacctgagcctggagctgagaaagcccatcaccttcggcgtgatcaccgccgacaccctggagcaggccatcgagagagccggcaccaagcacggcaacaagggctgggaggccgccctgagcgccatcgagatggccaacctgttcaagagcctgagaggcggcagcggcggcagcggcggcagcggcggcagcggcggcggcttcgcctgcaagaccgccaacggcaccgccatccccatcggcggcggcagcgccaacgtgtacgtgaacctggcccccgtggtgaacgtgggccagaacctggtggtggacctgagcacccagatcttctgccacaacgactaccccgagaccatcaccgactacgtgaccctgcagagaggcagcgcctacggcggcgtgctgagcaacttcagcggcaccgtgaagtacagcggcagcagctaccccttccccaccaccagcgagacccccagagtggtgtacaacagcagaaccgacaagccctggcccgtggccctgtacctgacccccgtgagcagcgccggcggcgtggccatcaaggccggcagcctgatcgccgtgctgatcctgagacagaccaacaactacaacagcgacgacttccagttcgtgtggaacatctacgccaacaacgacgtggtggtgcccaccggcggctgcgacgtgagcgccagagacgtgaccgtgaccctgcccgactaccccggcagcgtgcccatccccctgaccgtgtactgcgccaagagccagaacctgggctactacctgagcggcaccaccgccgacgccggcaacagcatcttcaccaacaccgccagcttcagccccgcccagggcgtgggcgtgcagctgaccagaaacggcaccatcatccccgccaacaacaccgtgagcctgggcgccgtgggcaccagcgccgtgagcctgggcctgaccgccaactacgccagaaccggcggccaggtgaccgccggcaacgtgcagagcatcatcggcgtgaccttcgtgtaccagcccggcgacggcaacgccgacgtgaccatcaccgtgaacggcaaggtggtggccaagtgatgatgaggactagtccctgttcccagagcccacttttttttctttttttgaaataaaatagcctgtctttcagatctaaaaaaaaaaaaaaaaaaaaaaaaaaaaaaaaaaaaaaaaaaaaaaaaaaaaaaaaaaaaaaaaaaaaaaaaaaaaaaaaaaaaaaaaaaaaaaaaaaaa

SEQ ID NO: 1238 - RNA, 1676 nt, synthetic construct
  misc_feature 1..1676: note Artificial____HsIgE(1-18)_Ec(J96)-FimH(22-300_N28S_N91S_N24 9Q)_Linker-PGDGN_Ec(J96)-FimG(24-37)_Linker-SGG_LumSynth(1- 154_C37A_N102D) mRNA opt4
  source 1..1676: mol_type = other RNA
aggagagtcccgcagtcggcgtccagcggctctgcttgttcgtgtgtgtgtcgttgcaggccttattcaagcttaccatggactggacctggatcctgttcctggtggccgccgccaccagagtgcacagcttcgcctgcaagaccgccagcggcaccgccatccccatcggcggcggcagcgccaacgtgtacgtgaacctggcccccgtggtgaacgtgggccagaacctggtggtggacctgagcacccagatcttctgccacaacgactaccccgagaccatcaccgactacgtgaccctgcagagaggcagcgcctacggcggcgtgctgagcagcttcagcggcaccgtgaagtacagcggcagcagctaccccttccccaccaccagcgagacccccagagtggtgtacaacagcagaaccgacaagccctggcccgtggccctgtacctgacccccgtgagcagcgccggcggcgtggccatcaaggccggcagcctgatcgccgtgctgatcctgagacagaccaacaactacaacagcgacgacttccagttcgtgtggaacatctacgccaacaacgacgtggtggtgcccaccggcggctgcgacgtgagcgccagagacgtgaccgtgaccctgcccgactaccccggcagcgtgcccatccccctgaccgtgtactgcgccaagagccagaacctgggctactacctgagcggcaccaccgccgacgccggcaacagcatcttcaccaacaccgccagcttcagccccgcccagggcgtgggcgtgcagctgaccagacagggcaccatcatccccgccaacaacaccgtgagcctgggcgccgtgggcaccagcgccgtgagcctgggcctgaccgccaactacgccagaaccggcggccaggtgaccgccggcaacgtgcagagcatcatcggcgtgaccttcgtgtaccagcccggcgacggcaacgccgacgtgaccatcaccgtgaacggcaaggtggtggccaagagcggcggcatgcagatctacgagggcaagctgaccgccgagggcctgagattcggcatcgtggccagcagattcaaccacgccctggtggacagactggtggagggcgccatcgacgccatcgtgagacacggcggcagagaggaggacatcaccctggtgagagtgcccggcagctgggagatccccgtggccgccggcgagctggccagaaaggaggacatcgacgccgtgatcgccatcggcgtgctgatcagaggcgccaccccccacttcgactacatcgccagcgaggtgagcaagggcctggccgacctgagcctggagctgagaaagcccatcaccttcggcgtgatcaccgccgacaccctggagcaggccatcgagagagccggcaccaagcacggcaacaagggctgggaggccgccctgagcgccatcgagatggccaacctgttcaagagcctgagatgatgatgaggactagtccctgttcccagagcccacttttttttctttttttgaaataaaatagcctgtctttcagatctaaaaaaaaaaaaaaaaaaaaaaaaaaaaaaaaaaaaaaaaaaaaaaaaaaaaaaaaaaaaaaaaaaaaaaaaaaaaaaaaaaaaaaaaaaaaaaaaaaaa

SEQ ID NO: 1239 - RNA, 1676 nt, synthetic construct
  misc_feature 1..1676: note Artificial____HsIgE(1-18)_Ec(J96)-FimH(22-300_N28S_N91S_N24 9Q_N256D)_Linker-PGDGN_Ec(J96)-FimG(24-37)_Linker-SGG_LumSy nth(1-154_C37A_N102D) mRNA opt4
  source 1..1676: mol_type = other RNA
aggagagtcccgcagtcggcgtccagcggctctgcttgttcgtgtgtgtgtcgttgcaggccttattcaagcttaccatggactggacctggatcctgttcctggtggccgccgccaccagagtgcacagcttcgcctgcaagaccgccagcggcaccgccatccccatcggcggcggcagcgccaacgtgtacgtgaacctggcccccgtggtgaacgtgggccagaacctggtggtggacctgagcacccagatcttctgccacaacgactaccccgagaccatcaccgactacgtgaccctgcagagaggcagcgcctacggcggcgtgctgagcagcttcagcggcaccgtgaagtacagcggcagcagctaccccttccccaccaccagcgagacccccagagtggtgtacaacagcagaaccgacaagccctggcccgtggccctgtacctgacccccgtgagcagcgccggcggcgtggccatcaaggccggcagcctgatcgccgtgctgatcctgagacagaccaacaactacaacagcgacgacttccagttcgtgtggaacatctacgccaacaacgacgtggtggtgcccaccggcggctgcgacgtgagcgccagagacgtgaccgtgaccctgcccgactaccccggcagcgtgcccatccccctgaccgtgtactgcgccaagagccagaacctgggctactacctgagcggcaccaccgccgacgccggcaacagcatcttcaccaacaccgccagcttcagccccgcccagggcgtgggcgtgcagctgaccagacagggcaccatcatccccgccgacaacaccgtgagcctgggcgccgtgggcaccagcgccgtgagcctgggcctgaccgccaactacgccagaaccggcggccaggtgaccgccggcaacgtgcagagcatcatcggcgtgaccttcgtgtaccagcccggcgacggcaacgccgacgtgaccatcaccgtgaacggcaaggtggtggccaagagcggcggcatgcagatctacgagggcaagctgaccgccgagggcctgagattcggcatcgtggccagcagattcaaccacgccctggtggacagactggtggagggcgccatcgacgccatcgtgagacacggcggcagagaggaggacatcaccctggtgagagtgcccggcagctgggagatccccgtggccgccggcgagctggccagaaaggaggacatcgacgccgtgatcgccatcggcgtgctgatcagaggcgccaccccccacttcgactacatcgccagcgaggtgagcaagggcctggccgacctgagcctggagctgagaaagcccatcaccttcggcgtgatcaccgccgacaccctggagcaggccatcgagagagccggcaccaagcacggcaacaagggctgggaggccgccctgagcgccatcgagatggccaacctgttcaagagcctgagatgatgatgaggactagtccctgttcccagagcccacttttttttctttttttgaaataaaatagcctgtctttcagatctaaaaaaaaaaaaaaaaaaaaaaaaaaaaaaaaaaaaaaaaaaaaaaaaaaaaaaaaaaaaaaaaaaaaaaaaaaaaaaaaaaaaaaaaaaaaaaaaaaaa

SEQ ID NO: 1240 - RNA, 1676 nt, synthetic construct
  misc_feature 1..1676: note Artificial____HsIgE(1-18)_Ec(J96)-FimH(22-300_N28S_V48C_L55 C_N91S_N249Q)_Linker-PGDGN_Ec(J96)-FimG(24-37)_Linker-SGG_L umSynth(1-154_C37A_N102D) mRNA opt4
  source 1..1676: mol_type = other RNA
aggagagtcccgcagtcggcgtccagcggctctgcttgttcgtgtgtgtgtcgttgcaggccttattcaagcttaccatggactggacctggatcctgttcctggtggccgccgccaccagagtgcacagcttcgcctgcaagaccgccagcggcaccgccatccccatcggcggcggcagcgccaacgtgtacgtgaacctggccccctgcgtgaacgtgggccagaactgcgtggtggacctgagcacccagatcttctgccacaacgactaccccgagaccatcaccgactacgtgaccctgcagagaggcagcgcctacggcggcgtgctgagcagcttcagcggcaccgtgaagtacagcggcagcagctaccccttccccaccaccagcgagacccccagagtggtgtacaacagcagaaccgacaagccctggcccgtggccctgtacctgacccccgtgagcagcgccggcggcgtggccatcaaggccggcagcctgatcgccgtgctgatcctgagacagaccaacaactacaacagcgacgacttccagttcgtgtggaacatctacgccaacaacgacgtggtggtgcccaccggcggctgcgacgtgagcgccagagacgtgaccgtgaccctgcccgactaccccggcagcgtgcccatccccctgaccgtgtactgcgccaagagccagaacctgggctactacctgagcggcaccaccgccgacgccggcaacagcatcttcaccaacaccgccagcttcagccccgcccagggcgtgggcgtgcagctgaccagacagggcaccatcatccccgccaacaacaccgtgagcctgggcgccgtgggcaccagcgccgtgagcctgggcctgaccgccaactacgccagaaccggcggccaggtgaccgccggcaacgtgcagagcatcatcggcgtgaccttcgtgtaccagcccggcgacggcaacgccgacgtgaccatcaccgtgaacggcaaggtggtggccaagagcggcggcatgcagatctacgagggcaagctgaccgccgagggcctgagattcggcatcgtggccagcagattcaaccacgccctggtggacagactggtggagggcgccatcgacgccatcgtgagacacggcggcagagaggaggacatcaccctggtgagagtgcccggcagctgggagatccccgtggccgccggcgagctggccagaaaggaggacatcgacgccgtgatcgccatcggcgtgctgatcagaggcgccaccccccacttcgactacatcgccagcgaggtgagcaagggcctggccgacctgagcctggagctgagaaagcccatcaccttcggcgtgatcaccgccgacaccctggagcaggccatcgagagagccggcaccaagcacggcaacaagggctgggaggccgccctgagcgccatcgagatggccaacctgttcaagagcctgagatgatgatgaggactagtccctgttcccagagcccacttttttttctttttttgaaataaaatagcctgtctttcagatctaaaaaaaaaaaaaaaaaaaaaaaaaaaaaaaaaaaaaaaaaaaaaaaaaaaaaaaaaaaaaaaaaaaaaaaaaaaaaaaaaaaaaaaaaaaaaaaaaaaa

SEQ ID NO: 1241 - RNA, 1676 nt, synthetic construct
  misc_feature 1..1676: note Artificial____HsIgE(1-18)_Ec(J96)-FimH(22-300_F165V)_Linker -PGDGN_Ec(J96)-FimG(24-37)_Linker-SGG_LumSynth(1-154_C37A_N 102D) mRNA opt4
  source 1..1676: mol_type = other RNA
aggagagtcccgcagtcggcgtccagcggctctgcttgttcgtgtgtgtgtcgttgcaggccttattcaagcttaccatggactggacctggatcctgttcctggtggccgccgccaccagagtgcacagcttcgcctgcaagaccgccaacggcaccgccatccccatcggcggcggcagcgccaacgtgtacgtgaacctggcccccgtggtgaacgtgggccagaacctggtggtggacctgagcacccagatcttctgccacaacgactaccccgagaccatcaccgactacgtgaccctgcagagaggcagcgcctacggcggcgtgctgagcaacttcagcggcaccgtgaagtacagcggcagcagctaccccttccccaccaccagcgagacccccagagtggtgtacaacagcagaaccgacaagccctggcccgtggccctgtacctgacccccgtgagcagcgccggcggcgtggccatcaaggccggcagcctgatcgccgtgctgatcctgagacagaccaacaactacaacagcgacgacttccaggtggtgtggaacatctacgccaacaacgacgtggtggtgcccaccggcggctgcgacgtgagcgccagagacgtgaccgtgaccctgcccgactaccccggcagcgtgcccatccccctgaccgtgtactgcgccaagagccagaacctgggctactacctgagcggcaccaccgccgacgccggcaacagcatcttcaccaacaccgccagcttcagccccgcccagggcgtgggcgtgcagctgaccagaaacggcaccatcatccccgccaacaacaccgtgagcctgggcgccgtgggcaccagcgccgtgagcctgggcctgaccgccaactacgccagaaccggcggccaggtgaccgccggcaacgtgcagagcatcatcggcgtgaccttcgtgtaccagcccggcgacggcaacgccgacgtgaccatcaccgtgaacggcaaggtggtggccaagagcggcggcatgcagatctacgagggcaagctgaccgccgagggcctgagattcggcatcgtggccagcagattcaaccacgccctggtggacagactggtggagggcgccatcgacgccatcgtgagacacggcggcagagaggaggacatcaccctggtgagagtgcccggcagctgggagatccccgtggccgccggcgagctggccagaaaggaggacatcgacgccgtgatcgccatcggcgtgctgatcagaggcgccaccccccacttcgactacatcgccagcgaggtgagcaagggcctggccgacctgagcctggagctgagaaagcccatcaccttcggcgtgatcaccgccgacaccctggagcaggccatcgagagagccggcaccaagcacggcaacaagggctgggaggccgccctgagcgccatcgagatggccaacctgttcaagagcctgagatgatgatgaggactagtccctgttcccagagcccacttttttttctttttttgaaataaaatagcctgtctttcagatctaaaaaaaaaaaaaaaaaaaaaaaaaaaaaaaaaaaaaaaaaaaaaaaaaaaaaaaaaaaaaaaaaaaaaaaaaaaaaaaaaaaaaaaaaaaaaaaaaaaa

SEQ ID NO: 1242 - RNA, 1703 nt, synthetic construct
  misc_feature 1..1703: note Artificial____HsIgE(1-18)_Ec(J96)-FimH(22-300_N28S_N91S_N24 9Q)_Linker-PGDGN_Ec(J96)-FimG(24-37)_Linker-SGG_Ferritin(5- 167_N19Q) mRNA opt4
  source 1..1703: mol_type = other RNA
aggagagtcccgcagtcggcgtccagcggctctgcttgttcgtgtgtgtgtcgttgcaggccttattcaagcttaccatggactggacctggatcctgttcctggtggccgccgccaccagagtgcacagcttcgcctgcaagaccgccagcggcaccgccatccccatcggcggcggcagcgccaacgtgtacgtgaacctggcccccgtggtgaacgtgggccagaacctggtggtggacctgagcacccagatcttctgccacaacgactaccccgagaccatcaccgactacgtgaccctgcagagaggcagcgcctacggcggcgtgctgagcagcttcagcggcaccgtgaagtacagcggcagcagctaccccttccccaccaccagcgagacccccagagtggtgtacaacagcagaaccgacaagccctggcccgtggccctgtacctgacccccgtgagcagcgccggcggcgtggccatcaaggccggcagcctgatcgccgtgctgatcctgagacagaccaacaactacaacagcgacgacttccagttcgtgtggaacatctacgccaacaacgacgtggtggtgcccaccggcggctgcgacgtgagcgccagagacgtgaccgtgaccctgcccgactaccccggcagcgtgcccatccccctgaccgtgtactgcgccaagagccagaacctgggctactacctgagcggcaccaccgccgacgccggcaacagcatcttcaccaacaccgccagcttcagccccgcccagggcgtgggcgtgcagctgaccagacagggcaccatcatccccgccaacaacaccgtgagcctgggcgccgtgggcaccagcgccgtgagcctgggcctgaccgccaactacgccagaaccggcggccaggtgaccgccggcaacgtgcagagcatcatcggcgtgaccttcgtgtaccagcccggcgacggcaacgccgacgtgaccatcaccgtgaacggcaaggtggtggccaagagcggcggcgacatcatcaagctgctgaacgagcaggtgaacaaggagatgcagagcagcaacctgtacatgagcatgagcagctggtgctacacccacagcctggacggcgccggcctgttcctgttcgaccacgccgccgaggagtacgagcacgccaagaagctgatcatcttcctgaacgagaacaacgtgcccgtgcagctgaccagcatcagcgcccccgagcacaagttcgagggcctgacccagatcttccagaaggcctacgagcacgagcagcacatcagcgagagcatcaacaacatcgtggaccacgccatcaagagcaaggaccacgccaccttcaacttcctgcagtggtacgtggccgagcagcacgaggaggaggtgctgttcaaggacatcctggacaagatcgagctgatcggcaacgagaaccacggcctgtacctggccgaccagtacgtgaagggcatcgccaagagcagaaagagctgatgatgaggactagtccctgttcccagagcccacttttttttctttttttgaaataaaatagcctgtctttcagatctaaaaaaaaaaaaaaaaaaaaaaaaaaaaaaaaaaaaaaaaaaaaaaaaaaaaaaaaaaaaaaaaaaaaaaaaaaaaaaaaaaaaaaaaaaaaaaaaaaaa

SEQ ID NO: 1243 - RNA, 1703 nt, synthetic construct
  misc_feature 1..1703: note Artificial____HsIgE(1-18)_Ec(J96)-FimH(22-300_N28S_N91S_N24 9Q_N256D)_Linker-PGDGN_Ec(J96)-FimG(24-37)_Linker-SGG_Ferri tin(5-167_N19Q) mRNA opt4
  source 1..1703: mol_type = other RNA
aggagagtcccgcagtcggcgtccagcggctctgcttgttcgtgtgtgtgtcgttgcaggccttattcaagcttaccatggactggacctggatcctgttcctggtggccgccgccaccagagtgcacagcttcgcctgcaagaccgccagcggcaccgccatccccatcggcggcggcagcgccaacgtgtacgtgaacctggcccccgtggtgaacgtgggccagaacctggtggtggacctgagcacccagatcttctgccacaacgactaccccgagaccatcaccgactacgtgaccctgcagagaggcagcgcctacggcggcgtgctgagcagcttcagcggcaccgtgaagtacagcggcagcagctaccccttccccaccaccagcgagacccccagagtggtgtacaacagcagaaccgacaagccctggcccgtggccctgtacctgacccccgtgagcagcgccggcggcgtggccatcaaggccggcagcctgatcgccgtgctgatcctgagacagaccaacaactacaacagcgacgacttccagttcgtgtggaacatctacgccaacaacgacgtggtggtgcccaccggcggctgcgacgtgagcgccagagacgtgaccgtgaccctgcccgactaccccggcagcgtgcccatccccctgaccgtgtactgcgccaagagccagaacctgggctactacctgagcggcaccaccgccgacgccggcaacagcatcttcaccaacaccgccagcttcagccccgcccagggcgtgggcgtgcagctgaccagacagggcaccatcatccccgccgacaacaccgtgagcctgggcgccgtgggcaccagcgccgtgagcctgggcctgaccgccaactacgccagaaccggcggccaggtgaccgccggcaacgtgcagagcatcatcggcgtgaccttcgtgtaccagcccggcgacggcaacgccgacgtgaccatcaccgtgaacggcaaggtggtggccaagagcggcggcgacatcatcaagctgctgaacgagcaggtgaacaaggagatgcagagcagcaacctgtacatgagcatgagcagctggtgctacacccacagcctggacggcgccggcctgttcctgttcgaccacgccgccgaggagtacgagcacgccaagaagctgatcatcttcctgaacgagaacaacgtgcccgtgcagctgaccagcatcagcgcccccgagcacaagttcgagggcctgacccagatcttccagaaggcctacgagcacgagcagcacatcagcgagagcatcaacaacatcgtggaccacgccatcaagagcaaggaccacgccaccttcaacttcctgcagtggtacgtggccgagcagcacgaggaggaggtgctgttcaaggacatcctggacaagatcgagctgatcggcaacgagaaccacggcctgtacctggccgaccagtacgtgaagggcatcgccaagagcagaaagagctgatgatgaggactagtccctgttcccagagcccacttttttttctttttttgaaataaaatagcctgtctttcagatctaaaaaaaaaaaaaaaaaaaaaaaaaaaaaaaaaaaaaaaaaaaaaaaaaaaaaaaaaaaaaaaaaaaaaaaaaaaaaaaaaaaaaaaaaaaaaaaaaaaa

SEQ ID NO: 1244 - RNA, 1703 nt, synthetic construct
  misc_feature 1..1703: note Artificial____HsIgE(1-18)_Ec(J96)-FimH(22-300_N28S_V48C_L55 C_N91S_N249Q)_Linker-PGDGN_Ec(J96)-FimG(24-37)_Linker-SGG_F erritin(5-167_N19Q) mRNA opt4
  source 1..1703: mol_type = other RNA
aggagagtcccgcagtcggcgtccagcggctctgcttgttcgtgtgtgtgtcgttgcaggccttattcaagcttaccatggactggacctggatcctgttcctggtggccgccgccaccagagtgcacagcttcgcctgcaagaccgccagcggcaccgccatccccatcggcggcggcagcgccaacgtgtacgtgaacctggccccctgcgtgaacgtgggccagaactgcgtggtggacctgagcacccagatcttctgccacaacgactaccccgagaccatcaccgactacgtgaccctgcagagaggcagcgcctacggcggcgtgctgagcagcttcagcggcaccgtgaagtacagcggcagcagctaccccttccccaccaccagcgagacccccagagtggtgtacaacagcagaaccgacaagccctggcccgtggccctgtacctgacccccgtgagcagcgccggcggcgtggccatcaaggccggcagcctgatcgccgtgctgatcctgagacagaccaacaactacaacagcgacgacttccagttcgtgtggaacatctacgccaacaacgacgtggtggtgcccaccggcggctgcgacgtgagcgccagagacgtgaccgtgaccctgcccgactaccccggcagcgtgcccatccccctgaccgtgtactgcgccaagagccagaacctgggctactacctgagcggcaccaccgccgacgccggcaacagcatcttcaccaacaccgccagcttcagccccgcccagggcgtgggcgtgcagctgaccagacagggcaccatcatccccgccaacaacaccgtgagcctgggcgccgtgggcaccagcgccgtgagcctgggcctgaccgccaactacgccagaaccggcggccaggtgaccgccggcaacgtgcagagcatcatcggcgtgaccttcgtgtaccagcccggcgacggcaacgccgacgtgaccatcaccgtgaacggcaaggtggtggccaagagcggcggcgacatcatcaagctgctgaacgagcaggtgaacaaggagatgcagagcagcaacctgtacatgagcatgagcagctggtgctacacccacagcctggacggcgccggcctgttcctgttcgaccacgccgccgaggagtacgagcacgccaagaagctgatcatcttcctgaacgagaacaacgtgcccgtgcagctgaccagcatcagcgcccccgagcacaagttcgagggcctgacccagatcttccagaaggcctacgagcacgagcagcacatcagcgagagcatcaacaacatcgtggaccacgccatcaagagcaaggaccacgccaccttcaacttcctgcagtggtacgtggccgagcagcacgaggaggaggtgctgttcaaggacatcctggacaagatcgagctgatcggcaacgagaaccacggcctgtacctggccgaccagtacgtgaagggcatcgccaagagcagaaagagctgatgatgaggactagtccctgttcccagagcccacttttttttctttttttgaaataaaatagcctgtctttcagatctaaaaaaaaaaaaaaaaaaaaaaaaaaaaaaaaaaaaaaaaaaaaaaaaaaaaaaaaaaaaaaaaaaaaaaaaaaaaaaaaaaaaaaaaaaaaaaaaaaaa

SEQ ID NO: 1245 - RNA, 1703 nt, synthetic construct
  misc_feature 1..1703: note Artificial____HsIgE(1-18)_Ec(J96)-FimH(22-300_F165V)_Linker -PGDGN_Ec(J96)-FimG(24-37)_Linker-SGG_Ferritin(5-167_N19Q) mRNA opt4
  source 1..1703: mol_type = other RNA
aggagagtcccgcagtcggcgtccagcggctctgcttgttcgtgtgtgtgtcgttgcaggccttattcaagcttaccatggactggacctggatcctgttcctggtggccgccgccaccagagtgcacagcttcgcctgcaagaccgccaacggcaccgccatccccatcggcggcggcagcgccaacgtgtacgtgaacctggcccccgtggtgaacgtgggccagaacctggtggtggacctgagcacccagatcttctgccacaacgactaccccgagaccatcaccgactacgtgaccctgcagagaggcagcgcctacggcggcgtgctgagcaacttcagcggcaccgtgaagtacagcggcagcagctaccccttccccaccaccagcgagacccccagagtggtgtacaacagcagaaccgacaagccctggcccgtggccctgtacctgacccccgtgagcagcgccggcggcgtggccatcaaggccggcagcctgatcgccgtgctgatcctgagacagaccaacaactacaacagcgacgacttccaggtggtgtggaacatctacgccaacaacgacgtggtggtgcccaccggcggctgcgacgtgagcgccagagacgtgaccgtgaccctgcccgactaccccggcagcgtgcccatccccctgaccgtgtactgcgccaagagccagaacctgggctactacctgagcggcaccaccgccgacgccggcaacagcatcttcaccaacaccgccagcttcagccccgcccagggcgtgggcgtgcagctgaccagaaacggcaccatcatccccgccaacaacaccgtgagcctgggcgccgtgggcaccagcgccgtgagcctgggcctgaccgccaactacgccagaaccggcggccaggtgaccgccggcaacgtgcagagcatcatcggcgtgaccttcgtgtaccagcccggcgacggcaacgccgacgtgaccatcaccgtgaacggcaaggtggtggccaagagcggcggcgacatcatcaagctgctgaacgagcaggtgaacaaggagatgcagagcagcaacctgtacatgagcatgagcagctggtgctacacccacagcctggacggcgccggcctgttcctgttcgaccacgccgccgaggagtacgagcacgccaagaagctgatcatcttcctgaacgagaacaacgtgcccgtgcagctgaccagcatcagcgcccccgagcacaagttcgagggcctgacccagatcttccagaaggcctacgagcacgagcagcacatcagcgagagcatcaacaacatcgtggaccacgccatcaagagcaaggaccacgccaccttcaacttcctgcagtggtacgtggccgagcagcacgaggaggaggtgctgttcaaggacatcctggacaagatcgagctgatcggcaacgagaaccacggcctgtacctggccgaccagtacgtgaagggcatcgccaagagcagaaagagctgatgatgaggactagtccctgttcccagagcccacttttttttctttttttgaaataaaatagcctgtctttcagatctaaaaaaaaaaaaaaaaaaaaaaaaaaaaaaaaaaaaaaaaaaaaaaaaaaaaaaaaaaaaaaaaaaaaaaaaaaaaaaaaaaaaaaaaaaaaaaaaaaaa

SEQ ID NO: 1246 - RNA, 980 nt, synthetic construct
  misc_feature 1..980: note Artificial____Ec(J96)-FimC(1-36)_Ec(J96)-FimC(37-241) mRNA opt5
  source 1..980: mol_type = other RNA
aggagagtcccgcagtcggcgtccagcggctctgcttgttcgtgtgtgtgtcgttgcaggccttattcaagcttaccatgagcaacaagaatgtgaacgtcagaaaatcccaggagatcaccttctgcctgctcgccggcattctgatgtttatggctatgatggttgccgggcgggcggaagctggagtggcccttggcgccacacgcgtgatctaccccgctgggcaaaagcaggtccagctggccgtgacgaataacgacgaaaattctacctatctcattcagagctgggttgagaacgctgatggagtgaaagacggcagattcatcgtcacacctccgctgtttgccatgaaggggaaaaaggagaatacccttcggattctggatgcgacaaacaatcaactcccccaggaccgcgaatccctgttctggatgaacgtgaaggccatcccttctatggataaaagcaagctgaccgagaatacactccagctggctatcatttccagaatcaaactttactatcggcccgccaagctggctctccctcccgaccaggccgcggagaaactgcgctttagacggtctgccaacagccttaccctgattaatcctacgccgtactatctcaccgttacagaactgaacgctggaacccgcgtgctggagaatgccctcgtgccccctatgggcgaatccacagtcaagctgcccagcgatgctggctctaacatcacctacagaacgattaacgactatggggcccttacacctaagatgaccggagtgatggagtgatgatgaggactagtccctgttcccagagcccacttttttttctttttttgaaataaaatagcctgtctttcagatctaaaaaaaaaaaaaaaaaaaaaaaaaaaaaaaaaaaaaaaaaaaaaaaaaaaaaaaaaaaaaaaaaaaaaaaaaaaaaaaaaaaaaaaaaaaaaaaaaaaa

SEQ ID NO: 1247 - RNA, 926 nt, synthetic construct
  misc_feature 1..926: note = Artificial____HsIgE(1-18)_Ec(J96)-FimC(37-241) mRNA opt5
  source 1..926: mol_type = other RNA
aggagagtcccgcagtcggcgtccagcggctctgcttgttcgtgtgtgtgtcgttgcaggccttattcaagcttaccatggactggacctggatcctgttcctcgtggccgctgccacaagagtccacagcggcgttgcgctgggggctacgcgggtgatttaccccgccggacagaagcaagtgcagcttgccgtcaccaacaatgatgagaactccacatatctgatccagtcttgggtggaaaatgctgacggcgttaaagatgggcgctttattgtgacccctcccctcttcgccatgaagggaaagaaggagaacacactgagaatccttgacgctaccaataaccagctgccgcaagatcgggaaagcctcttttggatgaatgtcaaagccattccttccatggacaagtctaagctgacagagaacaccctgcagctcgcgatcatcagccgcattaaactgtactatagacccgccaaacttgctctgcctcccgatcaggccgctgaaaaactccggttccgcagatccgccaattctctgacgcttatcaaccctaccccgtactatctgacagtgaccgagctcaatgcgggcacacgggttctggagaacgccctggtgccccctatgggggaaagcaccgtcaagctcccctccgacgctggaagcaatattacgtaccgcacaatcaacgattatggcgccctgacccctaaaatgacaggcgtgatggagtgatgatgaggactagtccctgttcccagagcccacttttttttctttttttgaaataaaatagcctgtctttcagatctaaaaaaaaaaaaaaaaaaaaaaaaaaaaaaaaaaaaaaaaaaaaaaaaaaaaaaaaaaaaaaaaaaaaaaaaaaaaaaaaaaaaaaaaaaaaaaaaaaaa

SEQ ID NO: 1248 - RNA, 1157 nt, synthetic construct
  misc_feature 1..1157: note Artificial____Ec(J96)-FimH(1-21)_Ec(J96)-FimH(22-300) mRNA opt5
  source 1..1157: mol_type = other RNA
aggagagtcccgcagtcggcgtccagcggctctgcttgttcgtgtgtgtgtcgttgcaggccttattcaagcttaccatgaagagagtgatcaccctgttcgccgtcctcctgatgggctggagcgttaacgcttggtcctttgcctgcaaaacagcgaatgggacggctattcccatcggaggcgggtctgccaacgtgtacgtgaatcttgcccctgtcgtgaacgttggacagaatctggtggtcgacctcagcacccaaattttctgtcacaacgattatccggagacaatcaccgactacgtgacactgcagcggggctccgcttatgggggagttctttctaattttagcggcaccgtgaagtactccggctctagctatcccttccctacaacctccgaaacgccccgcgtcgtgtacaacagcagaaccgataaaccttggcccgtggccctgtatctcacacctgtctcttccgctgggggagttgccattaaggcgggcagcctgatcgccgtgctgatcctccggcagaccaataactacaattctgacgattttcagttcgtgtggaacatttacgctaataacgacgtcgtggttccgacagggggatgcgatgtgtccgcccgcgacgtcaccgtgacgctgcccgattatcctggcagcgttcccatccctcttacagtgtactgtgctaaatctcaaaatctggggtattacctctccggaaccacagccgacgcgggcaacagcatttttaccaacaccgcctccttctctcccgctcagggcgtcggggtgcagctgacaagaaatggaacgatcattccggccaacaataccgtcagccttggcgctgtggggacatccgccgttagcctgggactcaccgccaactatgctcggacaggcggacaggtgaccgcggggaatgtccaatctatcattggcgtgacgtttgtttaccagtgatgatgaggactagtccctgttcccagagcccacttttttttctttttttgaaataaaatagcctgtctttcagatctaaaaaaaaaaaaaaaaaaaaaaaaaaaaaaaaaaaaaaaaaaaaaaaaaaaaaaaaaaaaaaaaaaaaaaaaaaaaaaaaaaaaaaaaaaaaaaaaaaaa

SEQ ID NO: 1249 - RNA, 1148 nt, synthetic construct
  misc_feature 1..1148: note = Artificial____HsIgE(1-18)_Ec(J96)-FimH(22-300) mRNA opt5
  source 1..1148: mol_type = other RNA
aggagagtcccgcagtcggcgtccagcggctctgcttgttcgtgtgtgtgtcgttgcaggccttattcaagcttaccatggactggacctggatcctgttcctcgtggccgctgccacaagagtccacagctttgcgtgcaagacggctaacggcaccgccattcccatcgggggaggctccgccaatgtttacgtgaacctggctcctgtggtcaatgtggggcagaaccttgttgtggatctgtctacacaaattttctgtcataatgactatccggagaccatcacagattacgtcaccctccagcggggaagcgcctatggcggggtgctgtccaacttttctggaacagttaaatacagcggctcctcttatcccttccctaccacgagcgaaacaccccgcgtggtctacaattccagaaccgacaagccttggcccgtggctctttatctgacccctgtgagctctgccggcggggtcgcgattaaagccggatccctcatcgctgttctgatcctgcggcagacaaacaattacaacagcgatgactttcagttcgtgtggaatatttacgccaacaatgatgtggtcgtgccgaccggcgggtgcgacgtttctgctcgcgatgtgacggtcacactccccgactatcctggatccgtgcccatccctctgaccgtttactgtgccaagagccaaaaccttggctattacctgtctgggacaaccgcggatgccggaaattccatttttaccaacacagctagcttctcccccgcccagggcgtgggcgtccagctcacgagaaacgggaccatcattccggctaataacacagtgtctctgggagccgtcggcaccagcgccgtgtcccttgggctgacagctaattatgcgcggaccggaggccaggttacggccgggaacgtgcaaagcatcattggagtcacatttgtgtaccagtgatgatgaggactagtccctgttcccagagcccacttttttttctttttttgaaataaaatagcctgtctttcagatctaaaaaaaaaaaaaaaaaaaaaaaaaaaaaaaaaaaaaaaaaaaaaaaaaaaaaaaaaaaaaaaaaaaaaaaaaaaaaaaaaaaaaaaaaaaaaaaaaaaa

SEQ ID NO: 1250 - RNA, 1154 nt, synthetic construct
  misc_feature 1..1154: note = Artificial____MmIgK(1-20)_Ec(J96)-FimH(22-300) mRNA opt5
  source 1..1154: mol_type = other RNA
aggagagtcccgcagtcggcgtccagcggctctgcttgttcgtgtgtgtgtcgttgcaggccttattcaagcttaccatggagaccgacacactgctcctgtgggtgcttctgctctgggtccccggcagcacggggttcgcctgcaagaccgctaacggaacagccatccctattggcgggggatccgcgaatgtttacgtgaacctggctccggtggtcaatgtgggccagaaccttgttgtggatctgtctacccaaatcttttgtcacaatgactatcccgaaacaattaccgattacgtcacactccagagagggagcgcctatggaggcgtgctgtccaacttctctggcaccgttaaatacagcgggtcctcttatccttttcccacgaccagcgagacacctcgggtggtctacaattcccgcaccgacaagccctggcctgtggccctgtatctcacaccggtgagctctgctggaggcgtcgccatcaaagctgggtccctgattgccgttcttatcctgagacagaccaacaattacaacagcgatgacttccagtttgtgtggaatatctacgcgaacaatgatgtggtcgtgcccacgggaggctgcgacgtttctgcccgggatgtgacagtcaccctccctgactatcccgggtccgtgcctattcccctgacagtttactgtgctaagagccaaaaccttggatattacctgtctggcaccaccgccgatgctggcaattccatcttcacaaacacggccagcttttccccggcgcagggggtgggagtccagctcacccgcaacggcacaattatccctgccaataacaccgtgtctctgggggctgtcggaacaagcgccgtgtccctgggcctcaccgctaattatgccagaacagggggacaggttacggccggcaacgtgcaaagcattatcggcgtcaccttcgtgtaccagtgatgatgaggactagtccctgttcccagagcccacttttttttctttttttgaaataaaatagcctgtctttcagatctaaaaaaaaaaaaaaaaaaaaaaaaaaaaaaaaaaaaaaaaaaaaaaaaaaaaaaaaaaaaaaaaaaaaaaaaaaaaaaaaaaaaaaaaaaaaaaaaaaaa

SEQ ID NO: 1251 - RNA, 1214 nt, synthetic construct
  misc_feature 1..1214: note Artificial____Ec(J96)-FimH(1-21)_Ec(J96)-FimH(22-300)_Linke r-PGDGN_Ec(J96)-FimG(24-37) mRNA opt5
  source 1..1214: mol_type = other RNA
aggagagtcccgcagtcggcgtccagcggctctgcttgttcgtgtgtgtgtcgttgcaggccttattcaagcttaccatgaagagagtgatcaccctgttcgccgtcctcctgatgggctggagcgttaacgcttggtcctttgcctgcaaaacagcgaatgggacggctattcccatcggaggcgggtctgccaacgtgtacgtgaatcttgcccctgtcgtgaacgttggacagaatctggtggtcgacctcagcacccaaattttctgtcacaacgattatccggagacaatcaccgactacgtgacactgcagcggggctccgcttatgggggagttctttctaattttagcggcaccgtgaagtactccggctctagctatcccttccctacaacctccgaaacgccccgcgtcgtgtacaacagcagaaccgataaaccttggcccgtggccctgtatctcacacctgtctcttccgctgggggagttgccattaaggcgggcagcctgatcgccgtgctgatcctccggcagaccaataactacaattctgacgattttcagttcgtgtggaacatttacgctaataacgacgtcgtggttccgacagggggatgcgatgtgtccgcccgcgacgtcaccgtgacgctgcccgattatcctggcagcgttcccatccctcttacagtgtactgtgctaaatctcaaaatctggggtattacctctccggaaccacagccgacgcgggcaacagcatttttaccaacaccgcctccttctctcccgctcagggcgtcggggtgcagctgacaagaaatggaacgatcattccggccaacaataccgtcagccttggcgctgtggggacatccgccgttagcctgggactcaccgccaactatgctcggacaggcggacaggtgaccgcggggaatgtccaatctatcattggcgtgacgtttgtttaccagcctggcgatgggaacgccgacgtgacaatcaccgtcaatggaaaggtggtggctaagtgatgatgaggactagtccctgttcccagagcccacttttttttctttttttgaaataaaatagcctgtctttcagatctaaaaaaaaaaaaaaaaaaaaaaaaaaaaaaaaaaaaaaaaaaaaaaaaaaaaaaaaaaaaaaaaaaaaaaaaaaaaaaaaaaaaaaaaaaaaaaaaaaaa

SEQ ID NO: 1252 - RNA, 1205 nt, synthetic construct
  misc_feature 1..1205: note Artificial____HsIgE(1-18)_Ec(J96)-FimH(22-300)_Linker-PGDGN _Ec(J96)-FimG(24-37) mRNA opt5
  source 1..1205: mol_type = other RNA
aggagagtcccgcagtcggcgtccagcggctctgcttgttcgtgtgtgtgtcgttgcaggccttattcaagcttaccatggactggacctggatcctgttcctcgtggccgctgccacaagagtccacagctttgcgtgcaagacggctaacggcaccgccattcccatcgggggaggctccgccaatgtttacgtgaacctggctcctgtggtcaatgtggggcagaaccttgttgtggatctgtctacacaaattttctgtcataatgactatccggagaccatcacagattacgtcaccctccagcggggaagcgcctatggcggggtgctgtccaacttttctggaacagttaaatacagcggctcctcttatcccttccctaccacgagcgaaacaccccgcgtggtctacaattccagaaccgacaagccttggcccgtggctctttatctgacccctgtgagctctgccggcggggtcgcgattaaagccggatccctcatcgctgttctgatcctgcggcagacaaacaattacaacagcgatgactttcagttcgtgtggaatatttacgccaacaatgatgtggtcgtgccgaccggcgggtgcgacgtttctgctcgcgatgtgacggtcacactccccgactatcctggatccgtgcccatccctctgaccgtttactgtgccaagagccaaaaccttggctattacctgtctgggacaaccgcggatgccggaaattccatttttaccaacacagctagcttctcccccgcccagggcgtgggcgtccagctcacgagaaacgggaccatcattccggctaataacacagtgtctctgggagccgtcggcaccagcgccgtgtcccttgggctgacagctaattatgcgcggaccggaggccaggttacggccgggaacgtgcaaagcatcattggagtcacatttgtgtaccagcctggcgacggcaatgctgatgttaccatcaccgtgaacgggaaagtcgtggccaagtgatgatgaggactagtccctgttcccagagcccacttttttttctttttttgaaataaaatagcctgtctttcagatctaaaaaaaaaaaaaaaaaaaaaaaaaaaaaaaaaaaaaaaaaaaaaaaaaaaaaaaaaaaaaaaaaaaaaaaaaaaaaaaaaaaaaaaaaaaaaaaaaaaa

SEQ ID NO: 1253 - RNA, 1211 nt, synthetic construct
  misc_feature 1..1211: note Artificial____HsIgE(1-18)_Ec(J96)-FimH(22-300)_Linker-G4SGG _Ec(J96)-FimG(24-37) mRNA opt5
  source 1..1211: mol_type = other RNA
aggagagtcccgcagtcggcgtccagcggctctgcttgttcgtgtgtgtgtcgttgcaggccttattcaagcttaccatggactggacctggatcctgttcctcgtggccgctgccacaagagtccacagctttgcgtgcaagacggctaacggcaccgccattcccatcgggggaggctccgccaatgtttacgtgaacctggctcctgtggtcaatgtggggcagaaccttgttgtggatctgtctacacaaattttctgtcataatgactatccggagaccatcacagattacgtcaccctccagcggggaagcgcctatggcggggtgctgtccaacttttctggaacagttaaatacagcggctcctcttatcccttccctaccacgagcgaaacaccccgcgtggtctacaattccagaaccgacaagccttggcccgtggctctttatctgacccctgtgagctctgccggcggggtcgcgattaaagccggatccctcatcgctgttctgatcctgcggcagacaaacaattacaacagcgatgactttcagttcgtgtggaatatttacgccaacaatgatgtggtcgtgccgaccggcgggtgcgacgtttctgctcgcgatgtgacggtcacactccccgactatcctggatccgtgcccatccctctgaccgtttactgtgccaagagccaaaaccttggctattacctgtctgggacaaccgcggatgccggaaattccatttttaccaacacagctagcttctcccccgcccagggcgtgggcgtccagctcacgagaaacgggaccatcattccggctaataacacagtgtctctgggagccgtcggcaccagcgccgtgtcccttgggctgacagctaattatgcgcggaccggaggccaggttacggccgggaacgtgcaaagcatcattggagtcacatttgtgtaccagggcggcgggggatctggcggggctgacgttaccatcaccgtgaatggaaaagtcgtggccaagtgatgatgaggactagtccctgttcccagagcccacttttttttctttttttgaaataaaatagcctgtctttcagatctaaaaaaaaaaaaaaaaaaaaaaaaaaaaaaaaaaaaaaaaaaaaaaaaaaaaaaaaaaaaaaaaaaaaaaaaaaaaaaaaaaaaaaaaaaaaaaaaaaaa

SEQ ID NO: 1254 - RNA, 1211 nt, synthetic construct
  misc_feature 1..1211: note Artificial____MmIgK(1-20)_Ec(J96)-FimH(22-300)_Linker-PGDGN _Ec(J96)-FimG(24-37) mRNA opt5
  source 1..1211: mol_type = other RNA
aggagagtcccgcagtcggcgtccagcggctctgcttgttcgtgtgtgtgtcgttgcaggccttattcaagcttaccatggagaccgacacactgctcctgtgggtgcttctgctctgggtccccggcagcacggggttcgcctgcaagaccgctaacggaacagccatccctattggcgggggatccgcgaatgtttacgtgaacctggctccggtggtcaatgtgggccagaaccttgttgtggatctgtctacccaaatcttttgtcacaatgactatcccgaaacaattaccgattacgtcacactccagagagggagcgcctatggaggcgtgctgtccaacttctctggcaccgttaaatacagcgggtcctcttatccttttcccacgaccagcgagacacctcgggtggtctacaattcccgcaccgacaagccctggcctgtggccctgtatctcacaccggtgagctctgctggaggcgtcgccatcaaagctgggtccctgattgccgttcttatcctgagacagaccaacaattacaacagcgatgacttccagtttgtgtggaatatctacgcgaacaatgatgtggtcgtgcccacgggaggctgcgacgtttctgcccgggatgtgacagtcaccctccctgactatcccgggtccgtgcctattcccctgacagtttactgtgctaagagccaaaaccttggatattacctgtctggcaccaccgccgatgctggcaattccatcttcacaaacacggccagcttttccccggcgcagggggtgggagtccagctcacccgcaacggcacaattatccctgccaataacaccgtgtctctgggggctgtcggaacaagcgccgtgtccctgggcctcaccgctaattatgccagaacagggggacaggttacggccggcaacgtgcaaagcattatcggcgtcaccttcgtgtaccagcccggggacggaaatgctgatgttaccattacagtgaacggcaaagtcgtggcgaagtgatgatgaggactagtccctgttcccagagcccacttttttttctttttttgaaataaaatagcctgtctttcagatctaaaaaaaaaaaaaaaaaaaaaaaaaaaaaaaaaaaaaaaaaaaaaaaaaaaaaaaaaaaaaaaaaaaaaaaaaaaaaaaaaaaaaaaaaaaaaaaaaaaa

SEQ ID NO: 1255 - RNA, 1211 nt, synthetic construct
  misc_feature 1..1211: note Artificial____MmIgK(1-20)_Ec(536)-FimH(22-300)_Linker-PGDGN _Ec(J96)-FimG(24-37) mRNA opt5
  source 1..1211: mol_type = other RNA
aggagagtcccgcagtcggcgtccagcggctctgcttgttcgtgtgtgtgtcgttgcaggccttattcaagcttaccatggagaccgacacactgctcctgtgggtgcttctgctctgggtccccggcagcacggggttcgcctgcaagaccgctaacggaacagccatccctattggcgggggatccgcgaatgtttacgtgaacctggctccggccgtgaatgtcggccagaaccttgtggttgatctgtctacccaaatcttttgtcacaatgactatcccgaaacaattaccgattacgtgacactccagagagggagcgcctatggaggcgtcctgtcctctttcagcggcaccgtgaaatacaacgggtcctcttatccttttcccacgaccagcgagacacctcgggttgtgtacaattcccgcaccgacaagccctggcctgtcgctctgtatctcacaccggtgagctctgccggaggcgtggctatcaaagccgggtccctgattgcggtccttatcctgagacagaccaacaattacaacagcgatgacttccagtttgtttggaatatctacgccaacaatgatgtggtggtccccacgggaggctgcgacgtgtctgctcgggatgttacagtgaccctccctgactatcccgggtccgtccctattcccctgacagtgtactgtgccaagagccaaaaccttggatattacctgtctggcaccaccgctgatgccggcaattccatcttcacaaacacggcgagcttttccccggcccagggggttggagtgcagctcacccgcaacggcacaattatccctgctaataacaccgtctctctgggggccgtgggaacaagcgctgtctccctgggcctcaccgccaattatgccagaacagggggacaggtgacggctggcaacgttcaaagcattatcggcgtgaccttcgtctaccagcccggggacggaaatgcggatgtgaccattacagttaacggcaaagtggtcgccaagtgatgatgaggactagtccctgttcccagagcccacttttttttctttttttgaaataaaatagcctgtctttcagatctaaaaaaaaaaaaaaaaaaaaaaaaaaaaaaaaaaaaaaaaaaaaaaaaaaaaaaaaaaaaaaaaaaaaaaaaaaaaaaaaaaaaaaaaaaaaaaaaaaaa

SEQ ID NO: 1256 - RNA, 1235 nt, synthetic construct
  misc_feature 1..1235: note Artificial____HsIgE(1-18)_Ec(J96)-FimH(22-300)_Linker-(G4S) 3_Ec(J96)-FimC(135-148) mRNA opt5
  source 1..1235: mol_type = other RNA
aggagagtcccgcagtcggcgtccagcggctctgcttgttcgtgtgtgtgtcgttgcaggccttattcaagcttaccatggactggacctggatcctgttcctcgtggccgctgccacaagagtccacagctttgcgtgcaagacggctaacggcaccgccattcccatcgggggaggctccgccaatgtttacgtgaacctggctcctgtggtcaatgtggggcagaaccttgttgtggatctgtctacacaaattttctgtcataatgactatccggagaccatcacagattacgtcaccctccagcggggaagcgcctatggcggggtgctgtccaacttttctggaacagttaaatacagcggctcctcttatcccttccctaccacgagcgaaacaccccgcgtggtctacaattccagaaccgacaagccttggcccgtggctctttatctgacccctgtgagctctgccggcggggtcgcgattaaagccggatccctcatcgctgttctgatcctgcggcagacaaacaattacaacagcgatgactttcagttcgtgtggaatatttacgccaacaatgatgtggtcgtgccgaccggcgggtgcgacgtttctgctcgcgatgtgacggtcacactccccgactatcctggatccgtgcccatccctctgaccgtttactgtgccaagagccaaaaccttggctattacctgtctgggacaaccgcggatgccggaaattccatttttaccaacacagctagcttctcccccgcccagggcgtgggcgtccagctcacgagaaacgggaccatcattccggctaataacacagtgtctctgggagccgtcggcaccagcgccgtgtcccttgggctgacagctaattatgcgcggaccggaggccaggttacggccgggaacgtgcaaagcatcattggagtcacatttgtgtaccagggcggcgggggatctggcgggggaggctccgggggcggaggcagcaccgagaataccctccagctggctatcatctctcgcattaaatgatgatgaggactagtccctgttcccagagcccacttttttttctttttttgaaataaaatagcctgtctttcagatctaaaaaaaaaaaaaaaaaaaaaaaaaaaaaaaaaaaaaaaaaaaaaaaaaaaaaaaaaaaaaaaaaaaaaaaaaaaaaaaaaaaaaaaaaaaaaaaaaaaa

SEQ ID NO: 1257 - RNA, 1658 nt, synthetic construct
  misc_feature 1..1658: note Artificial____LumSynth(1-154_C37A_N102D)_Linker(GGS)4-GGG_E c(J96)-FimH(22-300)_Linker-PGDGN_Ec(J96)-FimG(24-37) mRNA opt5
  source 1..1658: mol_type = other RNA
aggagagtcccgcagtcggcgtccagcggctctgcttgttcgtgtgtgtgtcgttgcaggccttattcaagcttaccatgcagatctacgagggcaagctgaccgccgaagggctcagattcggaattgtggctagccggtttaaccacgccctggtcgaccgccttgttgagggcgcgatcgatgctattgtgagacatgggggacgggaagaggacatcacactggtgcgcgtccccggctcctgggaaattcctgtggccgccggggagctcgctagaaaagaggatatcgacgccgttatcgctattggagtgctgatccggggcgccacgccgcacttcgattatattgcgtctgaagtcagcaagggccttgccgacctgtccctcgagctgcgcaaacccatcacctttggggtgattacagctgataccctggaacaagccatcgagagagctggaacaaagcatggcaataaagggtgggaggccgcgctctctgccattgaaatggctaacctgttcaagagccttcggggaggctccgggggatctggcggcagcgggggatccggcgggggatttgcctgcaagaccgctaatggcacagccatccctatcgggggaggcagcgccaacgtttacgtgaatctggctcccgtcgtgaacgtgggccagaatctcgtcgttgacctgtctacccagattttctgtcacaacgattatcctgagacgatcaccgactacgtgacacttcagcgcgggtccgcgtatggaggcgtgctgagcaatttttctgggaccgtcaaatactccggaagctcttatcccttccctacaacctccgaaacgccgagagtggtttacaacagccggacagataagccctggcctgtggccctctacctgacccccgtctcctctgctggcggggtggccattaaagccggcagcctgatcgctgttctcattctgcgccaaacaaataactataattccgacgattttcagttcgtgtggaacatctacgccaataacgacgtcgtggtccctaccggaggctgcgacgtgagcgcgagagatgttaccgtgacacttcccgactatccggggtctgtccctatccccctgacggtgtactgtgctaagtcccagaacctcggatattacctgagcggcaccacagccgatgccggaaattctatttttaccaacacagctagcttctcccctgcccagggggttggcgtgcaacttacccggaatgggacgatcattcccgctaacaatacagtctctctgggcgccgtgggaaccagcgcggtgtccctcggcctgaccgccaactatgctcgcacagggggacaggttaccgccggcaatgtccagagcatcattggggtgacatttgtgtaccagcccggagacggcaacgctgatgtcacgatcaccgtgaatgggaaagttgtggccaagtgatgatgaggactagtccctgttcccagagcccacttttttttctttttttgaaataaaatagcctgtctttcagatctaaaaaaaaaaaaaaaaaaaaaaaaaaaaaaaaaaaaaaaaaaaaaaaaaaaaaaaaaaaaaaaaaaaaaaaaaaaaaaaaaaaaaaaaaaaaaaaaaaaa

SEQ ID NO: 1258 - RNA, 1676 nt, synthetic construct
  misc_feature 1..1676: note Artificial____HsIgE(1-18)_Ec(J96)-FimH(22-300)_Linker-PGDGN _Ec(J96)-FimG(24-37)_Linker-SGG_LumSynth(1-154_C37A_N102D) mRNA opt5
  source 1..1676: mol_type = other RNA
aggagagtcccgcagtcggcgtccagcggctctgcttgttcgtgtgtgtgtcgttgcaggccttattcaagcttaccatggactggacctggatcctgttcctcgtggccgctgccacaagagtccacagctttgcgtgcaagacggctaacggcaccgccattcccatcgggggaggctccgccaatgtttacgtgaacctggctcctgtggtcaatgtggggcagaaccttgttgtggatctgtctacacaaattttctgtcataatgactatccggagaccatcacagattacgtcaccctccagcggggaagcgcctatggcggggtgctgtccaacttttctggaacagttaaatacagcggctcctcttatcccttccctaccacgagcgaaacaccccgcgtggtctacaattccagaaccgacaagccttggcccgtggctctttatctgacccctgtgagctctgccggcggggtcgcgattaaagccggatccctcatcgctgttctgatcctgcggcagacaaacaattacaacagcgatgactttcagttcgtgtggaatatttacgccaacaatgatgtggtcgtgccgaccggcgggtgcgacgtttctgctcgcgatgtgacggtcacactccccgactatcctggatccgtgcccatccctctgaccgtttactgtgccaagagccaaaaccttggctattacctgtctgggacaaccgcggatgccggaaattccatttttaccaacacagctagcttctcccccgcccagggcgtgggcgtccagctcacgagaaacgggaccatcattccggctaataacacagtgtctctgggagccgtcggcaccagcgccgtgtcccttgggctgacagctaattatgcgcggaccggaggccaggttacggccgggaacgtgcaaagcatcattggagtcacatttgtgtaccagcctggcgacggcaatgctgatgttaccatcaccgtgaacgggaaagtcgtggccaagtctggaggcatgcagatctatgaggggaagctcacagccgaaggactgcgcttcggcattgtggcttccagatttaatcacgccctggttgaccggctcgtcgagggggcgatcgacgctattgtgcgccatggcggaagagaagaggatatcaccctggtgcgggtccccggcagctgggagattcctgtggccgccggggaacttgctcgcaaagaggacatcgatgccgttatcgctattggagtgctgatcagaggcgccacaccccacttcgactacattgcgtctgaagtcagcaaggggctcgccgatctgtcccttgagctgcggaaacccatcacgtttggagtgattaccgctgacacactcgagcaggccatcgaacgcgctggcaccaagcatgggaacaaaggctgggaggccgcgctgtctgccatcgaaatggctaatctgttcaagagcctcagatgatgatgaggactagtccctgttcccagagcccacttttttttctttttttgaaataaaatagcctgtctttcagatctaaaaaaaaaaaaaaaaaaaaaaaaaaaaaaaaaaaaaaaaaaaaaaaaaaaaaaaaaaaaaaaaaaaaaaaaaaaaaaaaaaaaaaaaaaaaaaaaaaaa

SEQ ID NO: 1259 - RNA, 1703 nt, synthetic construct
  misc_feature 1..1703: note Artificial____HsIgE(1-18)_Ec(J96)-FimH(22-300)_Linker-PGDGN _Ec(J96)-FimG(24-37)_Linker-SGG_Ferritin(5-167_N19Q) mRNA opt5
  source 1..1703: mol_type = other RNA
aggagagtcccgcagtcggcgtccagcggctctgcttgttcgtgtgtgtgtcgttgcaggccttattcaagcttaccatggactggacctggatcctgttcctcgtggccgctgccacaagagtccacagctttgcgtgcaagacggctaacggcaccgccattcccatcgggggaggctccgccaatgtttacgtgaacctggctcctgtggtcaatgtggggcagaaccttgttgtggatctgtctacacaaattttctgtcataatgactatccggagaccatcacagattacgtcaccctccagcggggaagcgcctatggcggggtgctgtccaacttttctggaacagttaaatacagcggctcctcttatcccttccctaccacgagcgaaacaccccgcgtggtctacaattccagaaccgacaagccttggcccgtggctctttatctgacccctgtgagctctgccggcggggtcgcgattaaagccggatccctcatcgctgttctgatcctgcggcagacaaacaattacaacagcgatgactttcagttcgtgtggaatatttacgccaacaatgatgtggtcgtgccgaccggcgggtgcgacgtttctgctcgcgatgtgacggtcacactccccgactatcctggatccgtgcccatccctctgaccgtttactgtgccaagagccaaaaccttggctattacctgtctgggacaaccgcggatgccggaaattccatttttaccaacacagctagcttctcccccgcccagggcgtgggcgtccagctcacgagaaacgggaccatcattccggctaataacacagtgtctctgggagccgtcggcaccagcgccgtgtcccttgggctgacagctaattatgcgcggaccggaggccaggttacggccgggaacgtgcaaagcatcattggagtcacatttgtgtaccagcctggcgacggcaatgctgatgttaccatcaccgtgaacgggaaagtcgtggccaagtctggaggcgacatcattaagctcctgaatgaacaggtgaacaaagagatgcagtccagcaatctgtatatgtctatgagctcctggtgctacacacactctctcgacggggccggactgttcctttttgatcatgctgccgaggaatacgagcacgcgaagaaactgatcattttcctcaacgagaataacgttcccgtccaactgaccagcatctccgctcctgaacataagtttgagggccttacacagattttccagaaagcctatgaacacgagcaacacatcagcgagtctatcaataacattgtggaccatgccatcaagtccaaggatcacgctacgttcaattttctgcagtggtacgtggccgaacagcatgaggaagaggtcctcttcaaagacattctggataagatcgaactgattgggaacgagaaccacggcctctatctggctgaccagtacgtgaaaggaatcgccaagagccgcaaatcttgatgatgaggactagtccctgttcccagagcccacttttttttctttttttgaaataaaatagcctgtctttcagatctaaaaaaaaaaaaaaaaaaaaaaaaaaaaaaaaaaaaaaaaaaaaaaaaaaaaaaaaaaaaaaaaaaaaaaaaaaaaaaaaaaaaaaaaaaaaaaaaaaaa

SEQ ID NO: 1260 - RNA, 1733 nt, synthetic construct
  misc_feature 1..1733: note Artificial____MmIgK(1-20)_Ec(J96)-FimH(22-300)_Linker-PGDGN _Ec(J96)-FimG(24-37)_Linker-(GGS)4_Ferritin(5-166) mRNA opt5
  source 1..1733: mol_type = other RNA
aggagagtcccgcagtcggcgtccagcggctctgcttgttcgtgtgtgtgtcgttgcaggccttattcaagcttaccatggagaccgacacactgctcctgtgggtgcttctgctctgggtccccggcagcacggggttcgcctgcaagaccgctaacggaacagccatccctattggcgggggatccgcgaatgtttacgtgaacctggctccggtggtcaatgtgggccagaaccttgttgtggatctgtctacccaaatcttttgtcacaatgactatcccgaaacaattaccgattacgtcacactccagagagggagcgcctatggaggcgtgctgtccaacttctctggcaccgttaaatacagcgggtcctcttatccttttcccacgaccagcgagacacctcgggtggtctacaattcccgcaccgacaagccctggcctgtggccctgtatctcacaccggtgagctctgctggaggcgtcgccatcaaagctgggtccctgattgccgttcttatcctgagacagaccaacaattacaacagcgatgacttccagtttgtgtggaatatctacgcgaacaatgatgtggtcgtgcccacgggaggctgcgacgtttctgcccgggatgtgacagtcaccctccctgactatcccgggtccgtgcctattcccctgacagtttactgtgctaagagccaaaaccttggatattacctgtctggcaccaccgccgatgctggcaattccatcttcacaaacacggccagcttttccccggcgcagggggtgggagtccagctcacccgcaacggcacaattatccctgccaataacaccgtgtctctgggggctgtcggaacaagcgccgtgtccctgggcctcaccgctaattatgccagaacagggggacaggttacggccggcaacgtgcaaagcattatcggcgtcaccttcgtgtaccagcccggggacggaaatgctgatgttaccattacagtgaacggcaaagtcgtggcgaaagggggatctggcgggtccggcggaagcggcgggtctgacatcatcaagctgcttaatgaacaggtgaacaaggagatgaatagctccaacctgtatatgtctatgagctcctggtgctacacccatagcctcgacggagccggcctgtttcttttcgatcacgctgccgaagagtacgagcatgccaagaaactgattatctttctcaatgaaaacaatgttcctgtccagctgacatctatttccgctcccgagcacaagttcgaagggctgacgcaaatctttcagaaagcctatgagcatgagcagcacattagcgaatctatcaacaatatcgtggaccacgcgattaagtccaaggatcatgctaccttcaacttcctccaatggtacgtggccgagcagcacgaagaggaagtcctgtttaaagacatccttgataagattgagctgatcggaaacgagaatcatggcctctatctggccgaccagtacgtgaaagggattgctaagagccggaaatgatgatgaggactagtccctgttcccagagcccacttttttttctttttttgaaataaaatagcctgtctttcagatctaaaaaaaaaaaaaaaaaaaaaaaaaaaaaaaaaaaaaaaaaaaaaaaaaaaaaaaaaaaaaaaaaaaaaaaaaaaaaaaaaaaaaaaaaaaaaaaaaaaa

SEQ ID NO: 1261 - RNA, 1376 nt, synthetic construct
  misc_feature 1..1376: note Artificial____HsIgE(1-18)_Ec(J96)-FimH(22-300)_Linker-PGDGN _Ec(J96)-FimG(24-37)_TMdomain-HA(510-566) mRNA opt5
  source 1..1376: mol_type = other RNA
aggagagtcccgcagtcggcgtccagcggctctgcttgttcgtgtgtgtgtcgttgcaggccttattcaagcttaccatggactggacctggatcctgttcctcgtggccgctgccacaagagtccacagctttgcgtgcaagacggctaacggcaccgccattcccatcgggggaggctccgccaatgtttacgtgaacctggctcctgtggtcaatgtggggcagaaccttgttgtggatctgtctacacaaattttctgtcataatgactatccggagaccatcacagattacgtcaccctccagcggggaagcgcctatggcggggtgctgtccaacttttctggaacagttaaatacagcggctcctcttatcccttccctaccacgagcgaaacaccccgcgtggtctacaattccagaaccgacaagccttggcccgtggctctttatctgacccctgtgagctctgccggcggggtcgcgattaaagccggatccctcatcgctgttctgatcctgcggcagacaaacaattacaacagcgatgactttcagttcgtgtggaatatttacgccaacaatgatgtggtcgtgccgaccggcgggtgcgacgtttctgctcgcgatgtgacggtcacactccccgactatcctggatccgtgcccatccctctgaccgtttactgtgccaagagccaaaaccttggctattacctgtctgggacaaccgcggatgccggaaattccatttttaccaacacagctagcttctcccccgcccagggcgtgggcgtccagctcacgagaaacgggaccatcattccggctaataacacagtgtctctgggagccgtcggcaccagcgccgtgtcccttgggctgacagctaattatgcgcggaccggaggccaggttacggccgggaacgtgcaaagcatcattggagtcacatttgtgtaccagcctggcgacggcaatgctgatgttaccatcaccgtgaacgggaaagtcgtggccaaggccaagctcaatcgcgaggaaatcgacggagtgaaactggagtctacaagaatttatcagatcctggctatttactccaccgttgccagctctctcgtcctggtggtgagccttggcgcgatctccttctggatgtgctctaacgggagcctgcagtgtcggatttgcatctgatgatgaggactagtccctgttcccagagcccacttttttttctttttttgaaataaaatagcctgtctttcagatctaaaaaaaaaaaaaaaaaaaaaaaaaaaaaaaaaaaaaaaaaaaaaaaaaaaaaaaaaaaaaaaaaaaaaaaaaaaaaaaaaaaaaaaaaaaaaaaaaaaa

SEQ ID NO: 1262 - RNA, 1709 nt, synthetic construct
  misc_feature 1..1709: note Artificial____HsIgE(1-18)_LumSynth(1-154_C37A_N102D)_Linker (GGS)4-GGG_Ec(J96)-FimH(22-300)_Linker-PGDGN_Ec(J96)-FimG(2 4-37) mRNA opt5
  source 1..1709: mol_type = other RNA
aggagagtcccgcagtcggcgtccagcggctctgcttgttcgtgtgtgtgtcgttgcaggccttattcaagcttaccatggactggacctggatcctgttcctcgtggccgctgccacaagagtccacagccagatttacgagggcaagctgacggcggaagggcttcggtttggaatcgttgcttcccgcttcaaccatgccctggtggatagactcgtggagggcgccattgacgctatcgtccggcacgggggacgcgaagaggatattaccctggtgagagttcccggctcttgggaaatccctgtggccgctggggagcttgcccggaaagaggacatcgatgcggtcattgccatcggagtgctgattcgcggcgctacaccgcattttgactatatcgccagcgaagtttccaagggcctcgctgatctgtctctggagctcagaaaacccattaccttcggggtgatcacagccgacaccctggaacaagcgattgagcgggccggaacaaagcacggcaataaagggtgggaggctgcccttagcgctatcgaaatggccaacctgtttaagtccctccgcggaggctctgggggaagcggcggctccgggggaagcggcgggggattcgcctgcaagaccgctaatggcacggcgatccctattgggggaggctctgccaacgtctacgtgaatctggctcccgtggtcaacgttggccagaatcttgtggtggatctgtccacccagatcttttgtcataacgactatcctgagacaattaccgattacgtcacactccagagagggagcgcctatggaggcgtgctgtctaatttctccgggaccgttaaatacagcggatcttcctatccctttcctacgacaagcgaaaccccgcgggtggtctacaactcccgcacagacaagccctggcctgtggccctgtacctcacccccgtttctagcgctggcggggtggccatcaaagcgggctccctgattgctgtccttatcctgagacaaaccaataactataatagcgatgacttccagtttgtgtggaacatctacgccaataacgacgtcgtggttcctacaggaggctgcgatgtgtctgcccgggacgtcacggtgaccctccccgattatccggggtccgttcctattcccctgacagtgtactgtgctaagagccagaaccttggatattacctgtctggcaccacagccgacgctgggaatagcatcttcaccaacacggcctccttttctcctgcgcagggagtcggcgtgcaactcacacgcaatgggaccattatccccgccaacaataccgtgagcctgggcgctgttggaacatccgccgtcagcctgggcctcaccgctaactatgccagaacagggggacaggtgacggcgggcaatgtgcagtctattatcggggtcaccttcgtgtaccagcccggagatggcaacgccgacgttacaatcaccgtgaatgggaaagtcgtggctaagtgatgatgaggactagtccctgttcccagagcccacttttttttctttttttgaaataaaatagcctgtctttcagatctaaaaaaaaaaaaaaaaaaaaaaaaaaaaaaaaaaaaaaaaaaaaaaaaaaaaaaaaaaaaaaaaaaaaaaaaaaaaaaaaaaaaaaaaaaaaaaaaaaaa

SEQ ID NO: 1263 - RNA, 1676 nt, synthetic construct
  misc_feature 1..1676: note Artificial____HsIgE(1-18)_Ec(J96)-FimH(22-300_N28S_N91S_N24 9Q)_Linker-PGDGN_Ec(J96)-FimG(24-37)_Linker-SGG_LumSynth(1- 154_C37A_N102D) mRNA opt5
  source 1..1676: mol_type = other RNA
aggagagtcccgcagtcggcgtccagcggctctgcttgttcgtgtgtgtgtcgttgcaggccttattcaagcttaccatggactggacctggatcctgttcctcgtggccgctgccacaagagtccacagctttgcgtgcaagacggcttccggcaccgccattcccatcgggggaggctctgccaacgtttacgtgaatctggctcctgtggtcaacgtggggcagaatcttgttgtggatctgagcacacaaattttctgtcataacgactatccggagaccatcacagattacgtcaccctccagcggggatccgcctatggcggggtgctgtctagcttttccggaacagttaaatactctggcagctcctatcccttccctaccacgagcgaaacaccccgcgtggtctacaattctagaaccgacaagccttggcccgtggctctttatctgacccctgtgtccagcgccggcggggtcgcgattaaagccggatctctcatcgctgttctgatcctgcggcagacaaacaattacaactccgatgactttcagttcgtgtggaatatttacgccaacaatgatgtggtcgtgccgaccggcgggtgcgacgttagcgctcgcgatgtgacggtcacactccccgactatcctggatctgtgcccatccctctgaccgtttactgtgccaagtcccaaaaccttggctattacctgagcgggacaaccgcggatgccggaaattccatttttaccaacacagcttctttcagccccgcccagggcgtgggcgtccagctcacgagacaggggaccatcattccggctaataacacagtgtccctgggagccgtcggcaccagcgccgtgtctcttgggctgacagctaactatgcgcggaccggaggccaagttacggccgggaatgtgcagtccatcattggagtcacatttgtgtaccagcctggcgacggcaacgctgatgttaccatcaccgtgaatgggaaagtcgtggccaagagcggaggcatgcagatctatgaggggaagctcacagccgaaggactgcgcttcggcattgtggcttctagatttaaccacgccctggttgaccggctcgtcgagggggcgatcgacgctattgtgcgccatggcggaagagaagaggatatcaccctggtgcgggtccccggcagctgggagattcctgtggccgccggggaacttgctcgcaaagaggacatcgatgccgttatcgctattggagtgctgatcagaggcgccacaccccacttcgactacattgcgtccgaagtctctaaggggctcgccgatctgagccttgagctgcggaaacccatcacgtttggagtgattaccgctgacacactcgagcaagccatcgaacgcgctggcaccaagcatgggaataaaggctgggaggccgcgctgtccgccatcgaaatggctaacctgttcaagagcctcagatgatgatgaggactagtccctgttcccagagcccacttttttttctttttttgaaataaaatagcctgtctttcagatctaaaaaaaaaaaaaaaaaaaaaaaaaaaaaaaaaaaaaaaaaaaaaaaaaaaaaaaaaaaaaaaaaaaaaaaaaaaaaaaaaaaaaaaaaaaaaaaaaaaa

SEQ ID NO: 1264 - RNA, 1676 nt, synthetic construct
  misc_feature 1..1676: note Artificial____HsIgE(1-18)_Ec(J96)-FimH(22-300_N28S_N91S_N24 9Q_N256D)_Linker-PGDGN_Ec(J96)-FimG(24-37)_Linker-SGG_LumSy nth(1-154_C37A_N102D) mRNA opt5
  source 1..1676: mol_type = other RNA
aggagagtcccgcagtcggcgtccagcggctctgcttgttcgtgtgtgtgtcgttgcaggccttattcaagcttaccatggactggacctggatcctgttcctcgtggccgctgccacaagagtccacagctttgcgtgcaagacggcttccggcaccgccattcccatcgggggaggctctgccaacgtttacgtgaatctggctcctgtggtcaacgtggggcagaatcttgttgtggatctgagcacacaaattttctgtcataacgactatccggagaccatcacagattacgtcaccctccagcggggatccgcctatggcggggtgctgtctagcttttccggaacagttaaatactctggcagctcctatcccttccctaccacgagcgaaacaccccgcgtggtctacaattctagaaccgacaagccttggcccgtggctctttatctgacccctgtgtccagcgccggcggggtcgcgattaaagccggatctctcatcgctgttctgatcctgcggcagacaaacaattacaactccgatgactttcagttcgtgtggaatatttacgccaacaatgatgtggtcgtgccgaccggcgggtgcgacgttagcgctcgcgatgtgacggtcacactccccgactatcctggatctgtgcccatccctctgaccgtttactgtgccaagtcccaaaaccttggctattacctgagcgggacaaccgcggatgccggaaattccatttttaccaacacagcttctttcagccccgcccagggcgtgggcgtccagctcacgagacaggggaccatcattccggctgacaatacagtgtccctgggagccgtcggcaccagcgccgtgtctcttgggctgacagctaactatgcgcggaccggaggccaagttacggccgggaacgtgcagtccatcattggagtcacatttgtgtaccagcctggcgatggcaatgctgacgttaccatcaccgtgaacgggaaagtcgtggccaagagcggaggcatgcagatctatgaggggaagctcacagccgaaggactgcgcttcggcattgtggcttctagatttaatcacgccctggttgaccggctcgtcgagggggcgatcgatgctattgtgcgccatggcggaagagaagaggacatcaccctggtgcgggtccccggcagctgggagattcctgtggccgccggggaacttgctcgcaaagaggatatcgacgccgttatcgctattggagtgctgatcagaggcgccacaccccacttcgattacattgcgtccgaagtctctaaggggctcgccgacctgagccttgagctgcggaaacccatcacgtttggagtgattaccgctgatacactcgagcaagccatcgaacgcgctggcaccaagcatgggaacaaaggctgggaggccgcgctgtccgccatcgaaatggctaatctgttcaagagcctcagatgatgatgaggactagtccctgttcccagagcccacttttttttctttttttgaaataaaatagcctgtctttcagatctaaaaaaaaaaaaaaaaaaaaaaaaaaaaaaaaaaaaaaaaaaaaaaaaaaaaaaaaaaaaaaaaaaaaaaaaaaaaaaaaaaaaaaaaaaaaaaaaaaaa

SEQ ID NO: 1265 - RNA, 1676 nt, synthetic construct
  misc_feature 1..1676: note Artificial____HsIgE(1-18)_Ec(J96)-FimH(22-300_N28S_V48C_L55 C_N91S_N249Q)_Linker-PGDGN_Ec(J96)-FimG(24-37)_Linker-SGG_L umSynth(1-154_C37A_N102D) mRNA opt5
  source 1..1676: mol_type = other RNA
aggagagtcccgcagtcggcgtccagcggctctgcttgttcgtgtgtgtgtcgttgcaggccttattcaagcttaccatggactggacctggatcctgttcctcgtggccgctgccacaagagtccacagctttgcgtgcaagacggcttccggcaccgccattcccatcgggggaggctctgccaacgtttacgtgaatctggctccttgtgtgaacgtcgggcagaattgcgtggttgatcttagcacacaaattttctgtcataacgactatccggagaccatcacagattacgtgaccctgcagcggggatccgcctatggcggggtcctctctagcttttccggaacagtgaaatactctggcagctcctatcccttccctaccacgagcgaaacaccccgcgttgtgtacaattctagaaccgacaagccttggcccgtcgctctgtatcttacccctgtgtccagcgccggcggggtggcgattaaagccggatctctgatcgctgtcctcatcctgcggcagacaaacaattacaactccgatgactttcagttcgtttggaatatttacgccaacaatgatgtggtggtcccgaccggcgggtgcgacgtgagcgctcgcgatgttacggtgacactgcccgactatcctggatctgtccccatccctctcaccgtgtactgtgccaagtcccaaaacctgggctattaccttagcgggacaaccgcggatgccggaaattccatttttaccaacacagcttctttcagccccgcccagggcgttggcgtgcagctgacgagacaggggaccatcattccggctaataacacagtctccctcggagccgtgggcaccagcgccgtctctctggggcttacagctaactatgcgcggaccggaggccaagtgacggccgggaatgttcagtccatcattggagtgacatttgtctaccagcctggcgacggcaacgctgatgtgaccatcaccgttaatgggaaagtggtcgccaagagcggaggcatgcagatctatgaggggaagctgacagccgaaggactccgcttcggcattgtggcttctagatttaaccacgccctggtggaccggctggttgagggggcgatcgacgctattgtccgccatggcggaagagaagaggatatcaccctcgtgcgggtgcccggcagctgggagattcctgtcgccgccggggaactggctcgcaaagaggacatcgatgccgtgatcgctattggagttcttatcagaggcgccacaccccacttcgactacattgcgtccgaagtgtctaaggggctggccgatctcagcctggagcttcggaaacccatcacgtttggagtcattaccgctgacacactggagcaagccatcgaacgcgctggcaccaagcatgggaataaaggctgggaggccgcgctctccgccatcgaaatggctaacctgttcaagagcctgagatgatgatgaggactagtccctgttcccagagcccacttttttttctttttttgaaataaaatagcctgtctttcagatctaaaaaaaaaaaaaaaaaaaaaaaaaaaaaaaaaaaaaaaaaaaaaaaaaaaaaaaaaaaaaaaaaaaaaaaaaaaaaaaaaaaaaaaaaaaaaaaaaaaa

SEQ ID NO: 1266 - RNA, 1676 nt, synthetic construct
  misc_feature 1..1676: note Artificial____HsIgE(1-18)_Ec(J96)-FimH(22-300_F165V)_Linker -PGDGN_Ec(J96)-FimG(24-37)_Linker-SGG_LumSynth(1-154_C37A_N 102D) mRNA opt5
  source 1..1676: mol_type = other RNA
aggagagtcccgcagtcggcgtccagcggctctgcttgttcgtgtgtgtgtcgttgcaggccttattcaagcttaccatggactggacctggatcctgttcctcgtggccgctgccacaagagtccacagctttgcgtgcaagacggctaacggcaccgccattcccatcgggggaggctccgccaatgtttacgtgaacctggctcctgtggtcaatgtggggcagaaccttgttgtggatctgtctacacaaattttctgtcataatgactatccggagaccatcacagattacgtcaccctccagcggggaagcgcctatggcggggtgctgtccaacttttctggaacagttaaatacagcggctcctcttatcccttccctaccacgagcgaaacaccccgcgtggtctacaattccagaaccgacaagccttggcccgtggctctttatctgacccctgtgagctctgccggcggggtcgcgattaaagccggatccctcatcgctgttctgatcctgcggcagacaaacaattacaacagcgatgactttcaggtggtgtggaatatttacgccaacaatgatgtcgtggttccgaccggcgggtgcgacgtgtctgctcgcgatgtcacggtgacactccccgactatcctggatccgttcccatccctctgaccgtgtactgtgccaagagccaaaaccttggctattacctgtctgggacaaccgcggatgccggaaattccattttcaccaacacagctagcttttcccccgcccagggcgtcggcgtgcagctcacgagaaacgggaccatcattccggctaataacacagtctctctgggagccgtgggcaccagcgccgtttcccttgggctgacagctaattatgcgcggaccggaggccaggtgacggccgggaacgtccaaagcatcattggagtgacattcgtttaccagcctggcgacggcaatgctgatgtgaccatcaccgtcaacgggaaagtggtggccaagtctggaggcatgcagatctatgaggggaagctcacagccgaaggactgcgctttggcattgttgcttccagattcaatcacgccctggtcgaccggctcgtggagggggcgatcgacgctattgtgcgccatggcggaagagaagaggatatcaccctggtccgggtgcccggcagctgggagattcctgttgccgccggggaacttgctcgcaaagaggacatcgatgccgtgatcgctattggagtcctgatcagaggcgccacaccccactttgactacattgcgtctgaagtgagcaaggggctcgccgatctgtcccttgagctgcggaaacccatcacgttcggagttattaccgctgacacactcgagcaggccatcgaacgcgctggcaccaagcatgggaacaaaggctgggaggccgcgctgtctgccatcgaaatggctaatctgtttaagagcctcagatgatgatgaggactagtccctgttcccagagcccacttttttttctttttttgaaataaaatagcctgtctttcagatctaaaaaaaaaaaaaaaaaaaaaaaaaaaaaaaaaaaaaaaaaaaaaaaaaaaaaaaaaaaaaaaaaaaaaaaaaaaaaaaaaaaaaaaaaaaaaaaaaaaa

SEQ ID NO: 1267 - RNA, 1703 nt, synthetic construct
  misc_feature 1..1703: note Artificial____HsIgE(1-18)_Ec(J96)-FimH(22-300_N28S_N91S_N24 9Q)_Linker-PGDGN_Ec(J96)-FimG(24-37)_Linker-SGG_Ferritin(5- 167_N19Q) mRNA opt5
  source 1..1703: mol_type = other RNA
aggagagtcccgcagtcggcgtccagcggctctgcttgttcgtgtgtgtgtcgttgcaggccttattcaagcttaccatggactggacctggatcctgttcctcgtggccgctgccacaagagtccacagctttgcgtgcaagacggcttccggcaccgccattcccatcgggggaggctctgccaacgtttacgtgaatctggctcctgtggtcaacgtggggcagaatcttgttgtggatctgagcacacaaattttctgtcataacgactatccggagaccatcacagattacgtcaccctccagcggggatccgcctatggcggggtgctgtctagcttttccggaacagttaaatactctggcagctcctatcccttccctaccacgagcgaaacaccccgcgtggtctacaattctagaaccgacaagccttggcccgtggctctttatctgacccctgtgtccagcgccggcggggtcgcgattaaagccggatctctcatcgctgttctgatcctgcggcagacaaacaattacaactccgatgactttcagttcgtgtggaatatttacgccaacaatgatgtggtcgtgccgaccggcgggtgcgacgttagcgctcgcgatgtgacggtcacactccccgactatcctggatctgtgcccatccctctgaccgtttactgtgccaagtcccaaaaccttggctattacctgagcgggacaaccgcggatgccggaaattccatttttaccaacacagcttctttcagccccgcccagggcgtgggcgtccagctcacgagacaggggaccatcattccggctaataacacagtgtccctgggagccgtcggcaccagcgccgtgtctcttgggctgacagctaactatgcgcggaccggaggccaagttacggccgggaatgtgcagtccatcattggagtcacatttgtgtaccagcctggcgacggcaacgctgatgttaccatcaccgtgaatgggaaagtcgtggccaagagcggaggcgacatcattaagctcctgaacgaacaggtgaataaagagatgcaatctagcaacctgtatatgtccatgtctagctggtgctacacacactccctcgacggggccggactgttcctttttgatcatgctgccgaggaatacgagcacgcgaagaaactgatcattttcctcaatgagaacaatgttcccgtccagctgaccagcatctctgctcctgaacataagtttgagggccttacacagattttccaaaaagcctatgaacacgagcagcacatctccgagagcatcaacaatattgtggaccatgccatcaagtctaaggatcacgctacgttcaactttctgcagtggtacgtggccgaacagcatgaggaagaggtcctcttcaaagacattctggataagatcgaactgattgggaatgagaaccacggcctctatctggctgaccaatacgtgaaaggaatcgccaagtcccgcaaaagctgatgatgaggactagtccctgttcccagagcccacttttttttctttttttgaaataaaatagcctgtctttcagatctaaaaaaaaaaaaaaaaaaaaaaaaaaaaaaaaaaaaaaaaaaaaaaaaaaaaaaaaaaaaaaaaaaaaaaaaaaaaaaaaaaaaaaaaaaaaaaaaaaaa

SEQ ID NO: 1268 - RNA, 1703 nt, synthetic construct
  misc_feature 1..1703: note Artificial____HsIgE(1-18)_Ec(J96)-FimH(22-300_N28S_N91S_N24 9Q_N256D)_Linker-PGDGN_Ec(J96)-FimG(24-37)_Linker-SGG_Ferri tin(5-167_N19Q) mRNA opt5
  source 1..1703: mol_type = other RNA
aggagagtcccgcagtcggcgtccagcggctctgcttgttcgtgtgtgtgtcgttgcaggccttattcaagcttaccatggactggacctggatcctgttcctcgtggccgctgccacaagagtccacagctttgcgtgcaagacggcttccggcaccgccattcccatcgggggaggctctgccaacgtttacgtgaatctggctcctgtggtcaacgtggggcagaatcttgttgtggatctgagcacacaaattttctgtcataacgactatccggagaccatcacagattacgtcaccctccagcggggatccgcctatggcggggtgctgtctagcttttccggaacagttaaatactctggcagctcctatcccttccctaccacgagcgaaacaccccgcgtggtctacaattctagaaccgacaagccttggcccgtggctctttatctgacccctgtgtccagcgccggcggggtcgcgattaaagccggatctctcatcgctgttctgatcctgcggcagacaaacaattacaactccgatgactttcagttcgtgtggaatatttacgccaacaatgatgtggtcgtgccgaccggcgggtgcgacgttagcgctcgcgatgtgacggtcacactccccgactatcctggatctgtgcccatccctctgaccgtttactgtgccaagtcccaaaaccttggctattacctgagcgggacaaccgcggatgccggaaattccatttttaccaacacagcttctttcagccccgcccagggcgtgggcgtccagctcacgagacaggggaccatcattccggctgacaatacagtgtccctgggagccgtcggcaccagcgccgtgtctcttgggctgacagctaactatgcgcggaccggaggccaagttacggccgggaacgtgcagtccatcattggagtcacatttgtgtaccagcctggcgatggcaatgctgacgttaccatcaccgtgaacgggaaagtcgtggccaagagcggaggcgacatcattaagctcctgaatgaacaggtgaacaaagagatgcaatctagcaatctgtatatgtccatgtctagctggtgctacacacactccctcgatggggccggactgttcctttttgaccatgctgccgaggaatacgagcacgcgaagaaactgatcattttcctcaacgagaataacgttcccgtccagctgaccagcatctctgctcctgaacataagtttgagggccttacacagattttccaaaaagcctatgaacacgagcagcacatctccgagagcatcaataacattgtggatcatgccatcaagtctaaggaccacgctacgttcaattttctgcagtggtacgtggccgaacagcatgaggaagaggtcctcttcaaagatattctggacaagatcgaactgattgggaacgagaatcacggcctctatctggctgatcaatacgtgaaaggaatcgccaagtcccgcaaaagctgatgatgaggactagtccctgttcccagagcccacttttttttctttttttgaaataaaatagcctgtctttcagatctaaaaaaaaaaaaaaaaaaaaaaaaaaaaaaaaaaaaaaaaaaaaaaaaaaaaaaaaaaaaaaaaaaaaaaaaaaaaaaaaaaaaaaaaaaaaaaaaaaaa

SEQ ID NO: 1269 - RNA, 1703 nt, synthetic construct
  misc_feature 1..1703: note Artificial____HsIgE(1-18)_Ec(J96)-FimH(22-300_N28S_V48C_L55 C_N91S_N249Q)_Linker-PGDGN_Ec(J96)-FimG(24-37)_Linker-SGG_F erritin(5-167_N19Q) mRNA opt5
  source 1..1703: mol_type = other RNA
aggagagtcccgcagtcggcgtccagcggctctgcttgttcgtgtgtgtgtcgttgcaggccttattcaagcttaccatggactggacctggatcctgttcctcgtggccgctgccacaagagtccacagctttgcgtgcaagacggcttccggcaccgccattcccatcgggggaggctctgccaacgtttacgtgaatctggctccttgtgtgaacgtcgggcagaattgcgtggttgatcttagcacacaaattttctgtcataacgactatccggagaccatcacagattacgtgaccctgcagcggggatccgcctatggcggggtcctctctagcttttccggaacagtgaaatactctggcagctcctatcccttccctaccacgagcgaaacaccccgcgttgtgtacaattctagaaccgacaagccttggcccgtcgctctgtatcttacccctgtgtccagcgccggcggggtggcgattaaagccggatctctgatcgctgtcctcatcctgcggcagacaaacaattacaactccgatgactttcagttcgtttggaatatttacgccaacaatgatgtggtggtcccgaccggcgggtgcgacgtgagcgctcgcgatgttacggtgacactgcccgactatcctggatctgtccccatccctctcaccgtgtactgtgccaagtcccaaaacctgggctattaccttagcgggacaaccgcggatgccggaaattccatttttaccaacacagcttctttcagccccgcccagggcgttggcgtgcagctgacgagacaggggaccatcattccggctaataacacagtctccctcggagccgtgggcaccagcgccgtctctctggggcttacagctaactatgcgcggaccggaggccaagtgacggccgggaatgttcagtccatcattggagtgacatttgtctaccagcctggcgacggcaacgctgatgtgaccatcaccgttaatgggaaagtggtcgccaagagcggaggcgacatcattaagctgctcaacgaacaggtgaataaagagatgcaatctagcaacctgtatatgtccatgtctagctggtgctacacacactccctggacggggccggactcttcctgtttgatcatgctgccgaggaatacgagcacgcgaagaaacttatcattttcctgaatgagaacaatgtgcccgttcagctcaccagcatctctgctcctgaacataagtttgagggcctgacacagattttccaaaaagcctatgaacacgagcagcacatctccgagagcatcaacaatattgtcgaccatgccatcaagtctaaggatcacgctacgttcaactttcttcagtggtacgtggccgaacagcatgaggaagaggtgctgttcaaagacattctcgataagatcgaactgattgggaatgagaaccacggcctgtatctcgctgaccaatacgtcaaaggaatcgccaagtcccgcaaaagctgatgatgaggactagtccctgttcccagagcccacttttttttctttttttgaaataaaatagcctgtctttcagatctaaaaaaaaaaaaaaaaaaaaaaaaaaaaaaaaaaaaaaaaaaaaaaaaaaaaaaaaaaaaaaaaaaaaaaaaaaaaaaaaaaaaaaaaaaaaaaaaaaaa

SEQ ID NO: 1270 - RNA, 1703 nt, synthetic construct
  misc_feature 1..1703: note Artificial____HsIgE(1-18)_Ec(J96)-FimH(22-300_F165V)_Linker -PGDGN_Ec(J96)-FimG(24-37)_Linker-SGG_Ferritin(5-167_N19Q) mRNA opt5
  source 1..1703: mol_type = other RNA
aggagagtcccgcagtcggcgtccagcggctctgcttgttcgtgtgtgtgtcgttgcaggccttattcaagcttaccatggactggacctggatcctgttcctcgtggccgctgccacaagagtccacagctttgcgtgcaagacggctaacggcaccgccattcccatcgggggaggctccgccaatgtttacgtgaacctggctcctgtggtcaatgtggggcagaaccttgttgtggatctgtctacacaaattttctgtcataatgactatccggagaccatcacagattacgtcaccctccagcggggaagcgcctatggcggggtgctgtccaacttttctggaacagttaaatacagcggctcctcttatcccttccctaccacgagcgaaacaccccgcgtggtctacaattccagaaccgacaagccttggcccgtggctctttatctgacccctgtgagctctgccggcggggtcgcgattaaagccggatccctcatcgctgttctgatcctgcggcagacaaacaattacaacagcgatgactttcaggtggtgtggaatatttacgccaacaatgatgtcgtggttccgaccggcgggtgcgacgtgtctgctcgcgatgtcacggtgacactccccgactatcctggatccgttcccatccctctgaccgtgtactgtgccaagagccaaaaccttggctattacctgtctgggacaaccgcggatgccggaaattccattttcaccaacacagctagcttttcccccgcccagggcgtcggcgtgcagctcacgagaaacgggaccatcattccggctaataacacagtctctctgggagccgtgggcaccagcgccgtttcccttgggctgacagctaattatgcgcggaccggaggccaggtgacggccgggaacgtccaaagcatcattggagtgacattcgtttaccagcctggcgacggcaatgctgatgtgaccatcaccgtcaacgggaaagtggtggccaagtctggaggcgacatcattaagctcctgaatgagcaggttaacaaagaaatgcagtccagcaatctgtatatgtctatgagctcctggtgctacacacactctctcgacggggccggactgtttcttttcgatcatgctgccgaggaatacgagcacgcgaagaaactgatcatttttctcaacgagaataacgtccccgtgcaactgaccagcatctccgctcctgaacataagttcgagggccttacacagatttttcagaaagcctatgaacacgagcaacacatcagcgagtctatcaataacattgtggaccatgccatcaagtccaaggatcacgctacgttcaatttcctgcagtggtacgtcgccgaacagcatgaggaagaggtgctctttaaagacattctggataagatcgaactgattgggaacgagaaccacggcctctatctggctgaccagtacgttaaaggaatcgccaagagccgcaaatcttgatgatgaggactagtccctgttcccagagcccacttttttttctttttttgaaataaaatagcctgtctttcagatctaaaaaaaaaaaaaaaaaaaaaaaaaaaaaaaaaaaaaaaaaaaaaaaaaaaaaaaaaaaaaaaaaaaaaaaaaaaaaaaaaaaaaaaaaaaaaaaaaaaa

SEQ ID NO: 1271 - RNA, 1235 nt, synthetic construct; identical to SEQ ID NO: 829
  misc_feature 1..1235: note Artificial____MmIgK(1-20)_Ec(J96)-FimH(22-300)_Linker-PGDGN _Ec(J96)-FimG(24-37) mRNA opt1
  source 1..1235: mol_type = other RNA
  modified_base 1..1235: mod_base = m1f

SEQ ID NO: 1272 - RNA, 1700 nt, synthetic construct; identical to SEQ ID NO: 833
  misc_feature 1..1700: note Artificial____HsIgE(1-18)_Ec(J96)-FimH(22-300)_Linker-PGDGN _Ec(J96)-FimG(24-37)_Linker-SGG_LumSynth(1-154_C37A_N102D) mRNA opt1
  source 1..1700: mol_type = other RNA
  modified_base 1..1700: mod_base = m1f

SEQ ID NO: 1273 - RNA, 1727 nt, synthetic construct; identical to SEQ ID NO: 834
  misc_feature 1..1727: note Artificial____HsIgE(1-18)_Ec(J96)-FimH(22-300)_Linker-PGDGN _Ec(J96)-FimG(24-37)_Linker-SGG_Ferritin(5-167_N19Q) mRNA opt1
  source 1..1727: mol_type = other RNA
  modified_base 1..1727: mod_base = m1f

SEQ ID NO: 1274 - RNA, 1235 nt, synthetic construct; identical to SEQ ID NO: 829
  misc_feature 1..1235: note Artificial____MmIgK(1-20)_Ec(J96)-FimH(22-300)_Linker-PGDGN _Ec(J96)-FimG(24-37) mRNA opt1
  source 1..1235: mol_type = other RNA
  modified_base 1..1235: mod_base = p

SEQ ID NO: 1275 - RNA, 1700 nt, synthetic construct; identical to SEQ ID NO: 833
  misc_feature 1..1700: note Artificial____HsIgE(1-18)_Ec(J96)-FimH(22-300)_Linker-PGDGN _Ec(J96)-FimG(24-37)_Linker-SGG_LumSynth(1-154_C37A_N102D) mRNA opt1
  source 1..1700: mol_type = other RNA
  modified_base 1..1700: mod_base = p

SEQ ID NO: 1276 - RNA, 1727 nt, synthetic construct; identical to SEQ ID NO: 834
  misc_feature 1..1727: note Artificial____HsIgE(1-18)_Ec(J96)-FimH(22-300)_Linker-PGDGN _Ec(J96)-FimG(24-37)_Linker-SGG_Ferritin(5-167_N19Q) mRNA opt1
  source 1..1727: mol_type = other RNA
  modified_base 1..1727: mod_base = p

SEQ ID NO: 1277 - protein, 300 aa, synthetic construct
  REGION 1..300: note Artificial____Ec(J96)-FimH(22-300_N28S_G36A_G37A_V48S_N91S_ N249Q)_Linker-GGSSGGG_Ec(J96)-FimG(24-37) protein
FACKTASGTAIPIGAASANVYVNLAPAVNVGQNLVVDLSTQIFCHNDYPETITDYVTLQRGSAYGGVLSSFSGTVKYSGSSYPFPTTSETPRVVYNSRTDKPWPVALYLTPVSSAGGVAIKAGSLIAVLILRQTNNYNSDDFQFVWNIYANNDVVVPTGGCDVSARDVTVTLPDYPGSVPIPLTVYCAKSQNLGYYLSGTTADAGNSIFTNTASFSPAQGVGVQLTRQGTIIPANNTVSLGAVGTSAVSLGLTANYARTGGQVTAGNVQSIIGVTFVYQGGSSGGGADVTITVNGKVVAK
